(19) United States
(12) Patent Application Publication
(10) Pub. No.: US 2023/0002794 A1
(43) Pub. Date: Jan. 5, 2023

(54) MICROORGANISM FOR IMPROVED PENTOSE FERMENTATION

(71) Applicant: Novozymes A/S, Bagsvaerd (DK)

(72) Inventors: Sophie Calixte, Ottawa (CA); Monica Tassone, West Sacramento, CA (US); Sharon Liao, Sacramento, CA (US)

(73) Assignee: Novozymes A/S, Bagsvaerd (DK)

(21) Appl. No.: 17/777,810

(22) PCT Filed: Dec. 10, 2020
(86) PCT No.: PCT/US2020/064301

§ 371 Date: May 18, 2022

Related U.S. Application Data
(60) Provisional application No. 62/946,359, filed on Dec. 10, 2019.

(51) Int. Cl. C12P 7/10; C12N 1/18; C12N 15/52

(52) U.S. Cl. CPC C12P 7/10; C12N 1/185; C12N 15/52; C12Y 101/01009; C12Y 101/01307; C12Y 207/01017; C12Y 503/01005; C12R 2001/865

(57) ABSTRACT

Described herein are recombinant host organisms expressing a sugar transporter and an active pentose fermentation pathway. Also described are processes for producing a fermentation product, such as ethanol, from starch or cellulosic-containing material with the recombinant host organisms.

### REFERENCE TO A SEQUENCE LISTING

[0001] This application contains a Sequence Listing in computer readable form, which is incorporated herein by reference.

### BACKGROUND

[0002] Production of ethanol from starch and cellulosic containing materials is well-known in the art.

[0003] The most commonly industrially used commercial process for starch-containing material, often referred to as a “conventional process”, includes liquefying gelatinized starch at high temperature (about 85° C.) using typically a bacterial alpha-amylase, followed by simultaneous saccharification and fermentation (SSF) carried out anaerobically in the presence of typically a glucoamylase and a Saccharomyces cerevisiae yeast.

[0004] Yeasts which are used for production of ethanol for use as fuel, such as in the corn ethanol industry, require several characteristics to ensure cost effective production of the ethanol. These characteristics include ethanol tolerance, low by-product yield, rapid fermentation, and the ability to limit the amount of residual sugars remaining in the ferment. Such characteristics have a marked effect on the viability of the industrial process.

[0005] Yeast of the genus Saccharomyces exhibits many of the characteristics required for production of ethanol. In particular, strains of Saccharomyces cerevisiae are widely used for the production of ethanol in the fuel ethanol industry. Strains of Saccharomyces cerevisiae that are widely used in the fuel ethanol industry have the ability to produce high yields of ethanol under fermentation conditions found in, for example, the fermentation of corn mash. An example of such a strain is the yeast used in commercially available ethanol yeast product called ETHANOL RED®.

[0006] Efforts to establish and improve pentose (e.g., xylose) utilization of the yeast Saccharomyces cerevisiae have been reported (Kim et al., 2013, Biotechnol Adv. 31(6):851-61). These include heterologous expression of xylose reductase (XR) and xylitol dehydrogenase (XDH) from naturally xylose fermenting yeasts such as Scheffersomyces (Pichia) stipitis and various Candida species, as well as the overexpression of xylulokinase (XK) and the four enzymes in the non-oxidative pentose phosphate pathway (PPP), namely transketolase (TKL), transaldolase (TAL), ribose-5-phosphate ketol-isomerase (RKI) and D-ribulose-5-phosphate 3-epimerase (RPE). Modifying the co-factor preference of S. stipitis XR towards NADH in such systems has been found to provide metabolic advantages as well as improving anaerobic growth. Pathways replacing the XR/XDH with heterologous xylose isomerase (XI) have also been reported (e.g., WO2003/062430, WO2009/017441, WO2010/059095, WO2012/113120 and WO2012/135110). Efforts to improve arabinose utilization have been described in e.g., WO2003/095627, WO2010/074577 and U.S. Pat. No. 7,977,083.

[0007] Despite improvement of ethanol production processes from cellulosic material over the past decade, uptake of pentoses (e.g., xylose, arabinose) across the yeast membrane remains a challenge. WO2019/096718 relates to variant hexose transporters which can be expressed in a yeast for improved arabinose fermentation. However, there remains a need for improved pentose sugar utilization in genetically-engineered yeast for production of bioethanol in an economically and commercially relevant scale.

### SUMMARY

[0008] Described herein are, inter alia, methods for producing a fermentation product, such as ethanol, from starch or cellulosic-containing material, and microorganisms suitable for use in such processes. The Applicant has surprisingly found that yeast expressing certain sugar transporters in combination with an active pentose fermentation pathway show remarkably improved utilization of pentose sugars during fermentation.

[0009] A first aspect relates to a recombinant host cell comprising a heterologous polynucleotide encoding a sugar transporter, wherein the cell comprises an active pentose fermentation pathway.

[0010] In one embodiment, the sugar transporter has an amino acid sequence with at least 60%, e.g., at least 65%, 70%, 75%, 80%, 85%, 90%, 95%, 97%, 98%, 99%, or 100% sequence identity, to the amino acid sequence of any one of sugar transporters described herein (e.g., any one of SEQ ID NOs: 257-397; such as any one of SEQ ID NOs: 40, 53, 63, 72, 99, 108, 111, 123, 124 and 131; or any one of SEQ ID NOs: 97, 116 and 138). In one embodiment, the sugar transporter differs by no more than ten amino acids, e.g., by no more than five amino acids, by no more than four amino acids, by no more than three amino acids, by no more than two amino acids, or by one amino acid from the amino acid sequence of any one of sugar transporters described herein (e.g., any one of SEQ ID NOs: 257-397; such as any one of SEQ ID NOs: 40, 53, 63, 72, 99, 108, 111, 123, 124 and 131; or any one of SEQ ID NOs: 97, 116 and 138). In one embodiment, the signal peptide comprises or consists of the amino acid sequence of any one of sugar transporters described herein (e.g., any one of SEQ ID NOs: 257-397; such as any one of SEQ ID NOs: 40, 53, 63, 72, 99, 108, 111, 123, 124 and 131; or any one of SEQ ID NOs: 97, 116 and 138). In one embodiment, the sugar transporter is not a transporter having a mature polypeptide sequence of SEQ ID NO: 390 (or a transporter having a mature polypeptide sequence with at least 80%, e.g., at least 85%, 90%, 95%, 97%, 98%, or 99% sequence identity to the transporter of SEQ ID NO: 390).

[0011] In one embodiment, the recombinant host cell comprises an active xylose fermentation pathway. In one embodiment, the cell comprises one or more active xylose fermentation pathway genes selected from: a heterologous polynucleotide encoding a xylose isomerase (XI), and a heterologous polynucleotide encoding a xylulokinase (XK). In one embodiment, the cell comprises one or more active xylose fermentation pathway genes selected from: a heterologous polynucleotide encoding a xylose reductase (XR), a heterologous polynucleotide encoding a xylitol dehydrogenase (XDH), and a heterologous polynucleotide encoding a xylulokinase (XK).

[0012] In one embodiment, the recombinant host cell comprises an active arabinose fermentation pathway. In one embodiment, cell comprises one or more active arabinose fermentation pathway genes selected from: a heterologous polynucleotide encoding a L-arabinose isomerase (Al), a heterologous polynucleotide encoding a L-ribulokinase (RK), and a heterologous polynucleotide encoding a L-ribulose-5-P4-epimerase (RSPE). In one embodiment, the cell comprises one or more active arabinose fermentation pathway genes selected from: a heterologous polynucleotide encoding an aldose reductase (AR), a heterologous polynucleotide encoding a L-arabinitol 4-dehydrogenase (LAD), a heterologous polynucleotide encoding a L-xylulose reductase (LXR), a heterologous polynucleotide encoding a xylitol dehydrogenase (XDH) and a heterologous polynucleotide encoding a xylulokinase (XK).

[0013] In one embodiment, the recombinant host cell comprises an active xylose fermentation pathway and an active arabinose fermentation pathway.

[0014] In one embodiment, the recombinant host cell further comprises a heterologous polynucleotide encoding a glucoamylase. In one embodiment, the glucoamylase has a mature polypeptide sequence with at least 60%, e.g., at least 65%, 70%, 75%, 80%, 85%, 90%, 95%, 97%, 98%, 99%, or 100% sequence identity the amino acid sequence of any one of SEQ ID NOs: 8, 102-113, 229, 230 and 244-250.

[0015] In one embodiment, the recombinant host cell further comprises a heterologous polynucleotide encoding an alpha-amylase. In one embodiment, the alpha-amylase has a mature polypeptide sequence with at least 60%, e.g., at least 65%, 70%, 75%, 80%, 85%, 90%, 95%, 97%, 98%, 99%, or 100% sequence identity the amino acid sequence of any one of SEQ ID NOs: 76-101, 121-174, 231 and 251-256.

[0016] In one embodiment, the recombinant host cell further comprises a heterologous polynucleotide encoding a phospholipase. In one embodiment, the phospholipase has a mature polypeptide sequence with at least 60%, e.g., at least 65%, 70%, 75%, 80%, 85%, 90%, 95%, 97%, 98%, 99%, or 100% sequence identity the amino acid sequence of any one of SEQ ID NOs: 235, 236, 237, 238, 239, 240, 241 and 242.

[0017] In one embodiment, the recombinant host cell further comprises a heterologous polynucleotide encoding a trehalase. In one embodiment, the trehalase has a mature polypeptide sequence with at least 60%, e.g., at least 65%, 70%, 75%, 80%, 85%, 90%, 95%, 97%, 98%, 99%, or 100% sequence identity the amino acid sequence of any one of SEQ ID NOs: 175-226.

[0018] In one embodiment, the recombinant host cell further comprises a heterologous polynucleotide encoding a protease. In one embodiment, the protease has a mature polypeptide sequence with at least 60%, e.g., at least 65%, 70%, 75%, 80%, 85%, 90%, 95%, 97%, 98%, 99%, or 100% sequence identity the amino acid sequence of any one of SEQ ID NOs: 9-73.

[0019] In one embodiment, the recombinant host cell further comprises a heterologous polynucleotide encoding a pullulanase. In one embodiment, the pullulanase has a mature polypeptide sequence with at least 60%, e.g., at least 65%, 70%, 75%, 80%, 85%, 90%, 95%, 97%, 98%, 99%, or 100% sequence identity the amino acid sequence of any one of SEQ ID NOs: 114-120.

[0020] In one embodiment, the recombinant host cell is capable of higher anaerobic growth rate on pentose (e.g., xylose and/or arabinose) compared to the same cell without the heterologous polynucleotide encoding a sugar transporter (e.g., under conditions described in Example 2). In one embodiment, the cell is capable of higher pentose (e.g., xylose and/or arabinose) consumption compared to the same cell without the heterologous polynucleotide encoding a sugar transporter at about or after 120 hours fermentation (e.g., under conditions described in Example 2). In one embodiment, the cell is capable of consuming more than 65%, e.g., at least 70%, 75%, 80%, 85%, 90%, 95% of pentose (e.g., xylose and/or arabinose) in the medium at about or after 120 hours fermentation (e.g., under conditions described in Example 2). In one embodiment, the cell is capable of higher ethanol production compared to the same cell without the heterologous polynucleotide encoding a sugar transporter under the same conditions (e.g., after 40 hours of fermentation).

[0021] In one embodiment, the recombinant host cell further comprises a heterologous polynucleotide encoding a transketolase (TKL1). In one embodiment, the cell further comprises a heterologous polynucleotide encoding a transaldolase (TAL1). In one embodiment, the cell further comprises a disruption to an endogenous gene encoding a glycerol 3-phosphate dehydrogenase (GPD). In one embodiment, the cell further comprises a disruption to an endogenous gene encoding a glycerol 3-phosphatase (GPP).

[0022] In one embodiment, the recombinant host cell is a yeast cell. In one embodiment, the cell is a Saccharomyces, Rhodotorula, Schizosaccharomyces, Kluyveromyces, Pichia, Hansenula, Rhodosporidium, Candida, Yarrowia, Lipomyces, Cryptococcus, or Dekkera sp. yeast cell. In one embodiment, the cell is Saccharomyces cerevisiae.

[0023] A second aspect relates to methods of producing a fermentation product from a starch-containing or cellulosic-containing material, the method comprising:

[0024] (a) saccharifying the starch-containing or cellulosic-containing material; and

[0025] (b) fermenting the saccharified material of step (a) with the recombinant host cell of the first aspect.

[0026] In one embodiment, the method comprises liquefying the starch-containing material at a temperature above the initial gelatinization temperature in the presence of an alpha-amylase and/or a protease prior to saccharification. In one embodiment, the fermentation product is ethanol.

[0027] A third aspect relates to methods of producing a derivative of host cell of the first aspect, comprising culturing a host cell of the first aspect with a second host cell under conditions which permit combining of DNA between the first and second host cells, and screening or selecting for a derived host cell.

[0028] A fourth aspect relates to compositions comprising the host cell of the first aspect with one or more naturally occurring and/or non-naturally occurring components, such as components selected from the group consisting of: surfactants, emulsifiers, gums, swelling agents, and antioxidants.

### BRIEF DESCRIPTION OF THE FIGURES

[0029] FIG. 1 shows arabinose fermentation pathways from L-arabinose to D-xylulose 5-phosphate, which is then fermented to ethanol via the pentose phosphate pathway. The bacterial pathway utilizes genes L-arabinose isomerase (Al), L-ribulokinase (RK), and L-ribulose-5-P4-epimerase (RSPE) to convert L-arabinose to D-xylulose 5-phosphate. The fungal pathway proceeds using aldose reductase (AR), L-arabinitol 4-dehydrogenase (LAD), L-xylulose reductase (LXR), xylitol dehydrogenase (XDH) and xylulokinase (XK).

[0030] FIG. 2 shows xylose fermentation pathways from D-xylose to D-xylulose 5-phosphate, which is then fermented to ethanol via the pentose phosphate pathway. The oxido-reductase pathway uses an aldolase reductase (AR, such as xylose reductase (XR)) to reduce D-xylose to xylitol followed by oxidation of xylitol to D-xylulose with xylitol dehydrogenase (XDH). The isomerase pathway uses xylose isomerase (XI) to convert D-xylose directly into D-xylulose. D-xylulose is then converted to D-xylulose-5-phosphate with xylulokinase (XK).

[0031] FIG. 3 shows a plasmid map for pMIBa457.

[0032] FIG. 4 shows a plasmid map for pMLBA814.

[0033] FIG. 5 shows a plasmid map for pMLBA647.

[0034] FIG. 6 shows a plasmid map for pJDI N171.

[0035] FIG. 7 shows a plasmid map for HP70.

[0036] FIG. 8 shows a plasmid map for TH12.

[0037] FIG. 9 shows a plasmid map for TH26.

[0038] FIG. 10 shows a plasmid map for HP27.

[0039] FIG. 11 shows a plasmid map for pMLBA771.

[0040] FIG. 12 shows final ethanol levels from the experiment described in Example 5.

### DEFINTIONS

[0041] Unless defined otherwise or clearly indicated by context, all technical and scientific terms used herein have the same meaning as commonly understood by one of ordinary skill in the art.

[0042] Allelic variant: The term “allelic variant” means any of two or more alternative forms of a gene occupying the same chromosomal locus. Allelic variation arises naturally through mutation, and may result in polymorphism within populations. Gene mutations can be silent (no change in the encoded polypeptide) or may encode polypeptides having altered amino acid sequences. An allelic variant of a polypeptide is a polypeptide encoded by an allelic variant of a gene.

[0043] Alpha-amylase: The term “alpha amylase” means an 1,4-alpha-D-glucan glucanohydrolase, EC. 3.2.1.1, which catalyze hydrolysis of starch and other linear and branched 1,4-glucosidic oligo- and polysaccharides. For purposes of the present invention, alpha amylase activity can be determined using an alpha amylase assay described in the examples section below.

[0044] Auxiliary Activity 9: The term “Auxiliary Activity 9” or “AA9” means a polypeptide classified as a lytic polysaccharide monooxygenase (Quinlan et al., 2011, Proc. Natl. Acad. Sci. USA 208: 15079-15084; Phillips et al., 2011, ACS Chem. Biol. 6: 1399-1406; Lin et al., 2012, Structure 20: 1051-1061). AA9 polypeptides were formerly classified into the glycoside hydrolase Family 61 (GH61) according to Henrissat, 1991, Biochem. J. 280: 309-316, and Henrissat and Bairoch, 1996, Biochem. J. 316: 695-696.

[0045] AA9 polypeptides enhance the hydrolysis of a cellulosic-containing material by an enzyme having cellulolytic activity. Cellulolytic enhancing activity can be determined by measuring the increase in reducing sugars or the increase of the total of cellobiose and glucose from the hydrolysis of a cellulosic-containing material by cellulolytic enzyme under the following conditions: 1-50 mg of total protein/g of cellulose in pretreated corn stover (PCS), wherein total protein is comprised of 50-99.5% w/w cellulolytic enzyme protein and 0.5-50% w/w protein of an AA9 polypeptide for 1-7 days at a suitable temperature, such as 40 C-80° C., e.g., 50° C., 55° C., 60° C., 65° C., or 70° C., and a suitable pH, such as 4-9, e.g., 4.5, 5.0, 5.5, 6.0, 6.5, 7.0, 7.5, 8.0, or 8.5, compared to a control hydrolysis with equal total protein loading without cellulolytic enhancing activity (1-50 mg of cellulolytic protein/g of cellulose in PCS).

[0046] AA9 polypeptide enhancing activity can be determined using a mixture of CELLUCLAST® 1.5 L (Novozymes A/S, Bagsvrd, Denmark) and beta-glucosidase as the source of the cellulolytic activity, wherein the beta-glucosidase is present at a weight of at least 2-5% protein of the cellulase protein loading. In one embodiment, the beta-glucosidase is an Aspergillus oryzae beta-glucosidase (e.g., recombinantly produced in Aspergillus oryzae according to WO 02/095014). In another embodiment, the beta-glucosidase is an Aspergillus fumigatus beta-glucosidase (e.g., recombinantly produced in Aspergillus oryzae as described in WO 02/095014).

[0047] AA9 polypeptide enhancing activity can also be determined by incubating an AA9 polypeptide with 0.5% phosphoric acid swollen cellulose (PASC), 100 mM sodium acetate pH 5, 1 mM MnSO₄, 0.1% gallic acid, 0.025 mg/ml of Aspergillus fumigatus beta-glucosidase, and 0.01% TRITON® X-100 (4-(1,1,3,3-tetramethylbutyl)phenyl-polyethylene glycol) for 24-96 hours at 40° C. followed by determination of the glucose released from the PASC.

[0048] AA9 polypeptide enhancing activity can also be determined according to WO 2013/028928 for high temperature compositions.

[0049] AA9 polypeptides enhance the hydrolysis of a cellulosic-containing material catalyzed by enzyme having cellulolytic activity by reducing the amount of cellulolytic enzyme required to reach the same degree of hydrolysis preferably at least 1.01-fold, e.g., at least 1.05-fold, at least 1.10-fold, at least 1.25-fold, at least 1.5-fold, at least 2-fold, at least 3-fold, at least 4-fold, at least 5-fold, at least 10-fold, or at least 20-fold.

[0050] Beta-glucosidase: The term “beta-glucosidase” means a beta-D-glucoside glucohydrolase (E.C. 3.2.1.21) that catalyzes the hydrolysis of terminal non-reducing beta-D-glucose residues with the release of beta-D-glucose. Beta-glucosidase activity can be determined using p-nitrophenyl-beta-D-glucopyranoside as substrate according to the procedure of Venturi et al., 2002, J. Basic Microbiol. 42: 55-66. One unit of beta-glucosidase is defined as 1.0 μmole of p-nitrophenolate anion produced per minute at 25° C., pH 4.8 from 1 mM p-nitrophenyl-beta-D-glucopyranoside as substrate in 50 mM sodium citrate containing 0.01% TWEEN® 20.

[0051] Beta-xylosidase: The term “beta-xylosidase” means a beta-D-xyloside xylohydrolase (E.C. 3.2.1.37) that catalyzes the exo-hydrolysis of short beta (1→4)-xylooligosaccharides to remove successive D-xylose residues from non-reducing termini. Beta-xylosidase activity can be determined using 1 mM p-nitrophenyl-beta-D-xyloside as substrate in 100 mM sodium citrate containing 0.01% TWEEN® 20 at pH 5, 40° C. One unit of beta-xylosidase is defined as 1.0 μmole of p-nitrophenolate anion produced per minute at 40° C., pH 5 from 1 mM p-nitrophenyl-beta-D-xyloside in 100 mM sodium citrate containing 0.01% TWEEN® 20.

[0052] Catalase: The term “catalase” means a hydrogen-peroxide:hydrogen-peroxide oxidoreductase (EC 1.11.1.6) that catalyzes the conversion of 2 H₂O₂ to O₂+2 H₂O. For purposes of the present invention, catalase activity is determined according to U.S. Pat. No. 5,646,025. One unit of catalase activity equals the amount of enzyme that catalyzes the oxidation of 1 μmole of hydrogen peroxide under the assay conditions.

[0053] Catalytic domain: The term “catalytic domain” means the region of an enzyme containing the catalytic machinery of the enzyme.

[0054] Cellobiohydrolase: The term “cellobiohydrolase” means a 1,4-beta-D-glucan cellobiohydrolase (E.C. 3.2.1.91 and E.C. 3.2.1.176) that catalyzes the hydrolysis of 1,4-beta-D-glucosidic linkages in cellulose, cellooligosaccharides, or any beta-1,4-linked glucose containing polymer, releasing cellobiose from the reducing end (cellobiohydrolase I) or non-reducing end (cellobiohydrolase II) of the chain (Teeri, 1997, Trends in Biotechnology 15: 160-167; Teeri et al., 1998, Biochem. Soc. Trans. 26: 173-178). Cellobiohydrolase activity can be determined according to the procedures described by Lever et al., 1972, Anal. Biochem. 47: 273-279; van Tilbeurgh et al., 1982, FEBS Letters 149: 152-156; van Tilbeurgh and Claeyssens, 1985, FEBS Letters 187: 283-288; and Tomme et al., 1988, Eur. J. Biochem. 170: 575-581.

[0055] Cellulolytic enzyme or cellulase: The term “cellulolytic enzyme” or “cellulase” means one or more (e.g., several) enzymes that hydrolyze a cellulosic-containing material. Such enzymes include endoglucanase(s), cellobiohydrolase(s), beta-glucosidase(s), or combinations thereof. The two basic approaches for measuring cellulolytic enzyme activity include: (1) measuring the total cellulolytic enzyme activity, and (2) measuring the individual cellulolytic enzyme activities (endoglucanases, cellobiohydrolases, and beta-glucosidases) as reviewed in Zhang et al., 2006, Biotechnology Advances 24: 452-481. Total cellulolytic enzyme activity can be measured using insoluble substrates, including Whatman No 1 filter paper, microcrystalline cellulose, bacterial cellulose, algal cellulose, cotton, pretreated lignocellulose, etc. The most common total cellulolytic activity assay is the filter paper assay using Whatman No 1 filter paper as the substrate. The assay was established by the International Union of Pure and Applied Chemistry (IUPAC) (Ghose, 1987, Pure Appl. Chem. 59: 257-68).

[0056] Cellulolytic enzyme activity can be determined by measuring the increase in production/release of sugars during hydrolysis of a cellulosic-containing material by cellulolytic enzyme(s) under the following conditions: 1-50 mg of cellulolytic enzyme protein/g of cellulose in pretreated corn stover (PCS) (or other pretreated cellulosic-containing material) for 3-7 days at a suitable temperature such as 40° C.-80° C., e.g., 50° C., 55° C., 60° C., 65° C., or 70° C., and a suitable pH such as 4-9, e.g., 5.0, 5.5, 6.0, 6.5, or 7.0, compared to a control hydrolysis without addition of cellulolytic enzyme protein. Typical conditions are 1 ml reactions, washed or unwashed PCS, 5% insoluble solids (dry weight), 50 mM sodium acetate pH 5, 1 mM MnSO₄, 50° C., 55° C., or 60° C., 72 hours, sugar analysis by AMINEX® HPX-87H column chromatography (Bio-Rad Laboratories, Inc., Hercules, Calif., USA).

[0057] Coding sequence: The term “coding sequence” or “coding region” means a polynucleotide sequence, which specifies the amino acid sequence of a polypeptide. The boundaries of the coding sequence are generally determined by an open reading frame, which usually begins with the ATG start codon or alternative start codons such as GTG and TTG and ends with a stop codon such as TAA, TAG, and TGA. The coding sequence may be a sequence of genomic DNA, cDNA, a synthetic polynucleotide, and/or a recombinant polynucleotide.

[0058] Control sequence: The term “control sequence” means a nucleic acid sequence necessary for polypeptide expression. Control sequences may be native or foreign to the polynucleotide encoding the polypeptide, and native or foreign to each other. Such control sequences include, but are not limited to, a leader sequence, polyadenylation sequence, propeptide sequence, promoter sequence, signal peptide sequence, and transcription terminator sequence. The control sequences may be provided with linkers for the purpose of introducing specific restriction sites facilitating ligation of the control sequences with the coding region of the polynucleotide encoding a polypeptide.

[0059] Disruption: The term “disruption” means that a coding region and/or control sequence of a referenced gene is partially or entirely modified (such as by deletion, insertion, and/or substitution of one or more nucleotides) resulting in the absence (inactivation) or decrease in expression, and/or the absence or decrease of enzyme activity of the encoded polypeptide. The effects of disruption can be measured using techniques known in the art such as detecting the absence or decrease of enzyme activity using from cell-free extract measurements referenced herein; or by the absence or decrease of corresponding mRNA (e.g., at least 25% decrease, at least 50% decrease, at least 60% decrease, at least 70% decrease, at least 80% decrease, or at least 90% decrease); the absence or decrease in the amount of corresponding polypeptide having enzyme activity (e.g., at least 25% decrease, at least 50% decrease, at least 60% decrease, at least 70% decrease, at least 80% decrease, or at least 90% decrease); or the absence or decrease of the specific activity of the corresponding polypeptide having enzyme activity (e.g., at least 25% decrease, at least 50% decrease, at least 60% decrease, at least 70% decrease, at least 80% decrease, or at least 90% decrease). Disruptions of a particular gene of interest can be generated by methods known in the art, e.g., by directed homologous recombination (see Methods in Yeast Genetics (1997 edition), Adams, Gottschling, Kaiser, and Stems, Cold Spring Harbor Press (1998)).

[0060] Endogenous gene: The term “endogenous gene” means a gene that is native to the referenced host cell. “Endogenous gene expression” means expression of an endogenous gene.

[0061] Endoglucanase: The term “endoglucanase” means a 4-(1,3;1,4)-beta-D-glucan 4-glucanohydrolase (E.C. 3.2.1.4) that catalyzes endohydrolysis of 1,4-beta-D-glycosidic linkages in cellulose, cellulose derivatives (such as carboxymethyl cellulose and hydroxyethyl cellulose), lichenin, beta-1,4 bonds in mixed beta-1,3-1,4 glucans such as cereal beta-D-glucans or xyloglucans, and other plant material containing cellulosic components. Endoglucanase activity can be determined by measuring reduction in substrate viscosity or increase in reducing ends determined by a reducing sugar assay (Zhang et al., 2006, Biotechnology Advances 24: 452-481). Endoglucanase activity can also be determined using carboxymethyl cellulose (CMC) as substrate according to the procedure of Ghose, 1987, Pure and Appl. Chem. 59: 257-268, at pH 5, 40° C.

[0062] Expression: The term “expression” includes any step involved in the production of the polypeptide including, but not limited to, transcription, post-transcriptional modification, translation, post-translational modification, and secretion. Expression can be measured—for example, to detect increased expression—by techniques known in the art, such as measuring levels of mRNA and/or translated polypeptide.

[0063] Expression vector: The term “expression vector” means a linear or circular DNA molecule that comprises a polynucleotide encoding a polypeptide and is operably linked to control sequences that provide for its expression.

[0064] Fermentable medium: The term “fermentable medium” or “fermentation medium” refers to a medium comprising one or more (e.g., two, several) sugars, such as glucose, fructose, sucrose, cellobiose, xylose, xylulose, arabinose, mannose, galactose, and/or soluble oligosaccharides, wherein the medium is capable, in part, of being converted (fermented) by a host cell into a desired product, such as ethanol. In some instances, the fermentation medium is derived from a natural source, such as sugar cane, starch, or cellulose, and may be the result of pretreating the source by enzymatic hydrolysis (saccharification). The term fermentation medium is understood herein to refer to a medium before the fermenting organism is added, such as, a medium resulting from a saccharification process, as well as a medium used in a simultaneous saccharification and fermentation process (SSF).

[0065] Glucoamylase: The term “glucoamylase” (1,4-alpha-D-glucan glucohydrolase, EC 3.2.1.3) is defined as an enzyme that catalyzes the release of D-glucose from the non-reducing ends of starch or related oligo- and polysaccharide molecules. For purposes of the present invention, glucoamylase activity may be determined according to the procedures known in the art, such as those described in the Examples of PCT/US2019/042870, filed Jul. 22, 2019.

[0066] Hemicellulolytic enzyme or hemicellulase: The term “hemicellulolytic enzyme” or “hemicellulase” means one or more (e.g., several) enzymes that hydrolyze a hemicellulosic material. See, for example, Shallom and Shoham, 2003, Current Opinion In Microbiology 6(3): 219-228). Hemicellulases are key components in the degradation of plant biomass. Examples of hemicellulases include, but are not limited to, an acetylmannan esterase, an acetylxylan esterase, an arabinanase, an arabinofuranosidase, a coumaric acid esterase, a feruloyl esterase, a galactosidase, a glucuronidase, a glucuronoyl esterase, a mannanase, a mannosidase, a xylanase, and a xylosidase. The substrates for these enzymes, hemicelluloses, are a heterogeneous group of branched and linear polysaccharides that are bound via hydrogen bonds to the cellulose microfibrils in the plant cell wall, crosslinking them into a robust network. Hemicelluloses are also covalently attached to lignin, forming together with cellulose a highly complex structure. The variable structure and organization of hemicelluloses require the concerted action of many enzymes for its complete degradation. The catalytic modules of hemicellulases are either glycoside hydrolases (GHs) that hydrolyze glycosidic bonds, or carbohydrate esterases (CEs), which hydrolyze ester linkages of acetate or ferulic acid side groups. These catalytic modules, based on homology of their primary sequence, can be assigned into GH and CE families. Some families, with an overall similar fold, can be further grouped into clans, marked alphabetically (e.g., GH-A). A most informative and updated classification of these and other carbohydrate active enzymes is available in the Carbohydrate-Active Enzymes (CAZy) database. Hemicellulolytic enzyme activities can be measured according to Ghose and Bisaria, 1987, Pure & Appl. Chem. 59: 1739-1752, at a suitable temperature such as 40° C.-80° C., e.g., 50° C., 55° C., 60° C., 65° C., or 70° C., and a suitable pH such as 4-9, e.g., 5.0, 5.5, 6.0, 6.5, or 7.0.

[0067] Heterologous polynucleotide: The term “heterologous polynucleotide” is defined herein as a polynucleotide that is not native to the host cell; a native polynucleotide in which structural modifications have been made to the coding region; a native polynucleotide whose expression is quantitatively altered as a result of a manipulation of the DNA by recombinant DNA techniques, e.g., a different (foreign) promoter; or a native polynucleotide in a host cell having one or more extra copies of the polynucleotide to quantitatively alter expression. A “heterologous gene” is a gene comprising a heterologous polynucleotide.

[0068] High stringency conditions: The term “high stringency conditions” means for probes of at least 100 nucleotides in length, prehybridization and hybridization at 42° C. in 5×SSPE, 0.3% SDS, 200 micrograms/ml sheared and denatured salmon sperm DNA, and 50% formamide, following standard Southern blotting procedures for 12 to 24 hours. The carrier material is finally washed three times each for 15 minutes using 0.2×SSC, 0.2% SDS at 65° C.

[0069] Host cell: The term “host cell” means any cell type that is susceptible to transformation, transfection, transduction, and the like with a nucleic acid construct or expression vector comprising a polynucleotide described herein. The term “host cell” encompasses any progeny of a parent cell that is not identical to the parent cell due to mutations that occur during replication. The term “recombinant cell” is defined herein as a non-naturally occurring host cell comprising one or more (e.g., two, several) heterologous polynucleotides.

[0070] Low stringency conditions: The term “low stringency conditions” means for probes of at least 100 nucleotides in length, prehybridization and hybridization at 42° C. in 5×SSPE, 0.3% SDS, 200 micrograms/ml sheared and denatured salmon sperm DNA, and 25% formamide, following standard Southern blotting procedures for 12 to 24 hours. The carrier material is finally washed three times each for 15 minutes using 0.2×SSC, 0.2% SDS at 50° C.

[0071] Mature polypeptide: The term “mature polypeptide” is defined herein as a polypeptide having biological activity that is in its final form following translation and any post-translational modifications, such as N-terminal processing, C-terminal truncation, glycosylation, phosphorylation, etc. The mature polypeptide sequence lacks a signal sequence, which may be determined using techniques known in the art (See, e.g., Zhang and Henzel, 2004, Protein Science 13: 2819-2824). The term “mature polypeptide coding sequence” means a polynucleotide that encodes a mature polypeptide.

[0072] Medium stringency conditions: The term “medium stringency conditions” means for probes of at least 100 nucleotides in length, prehybridization and hybridization at 42° C. in 5×SSPE, 0.3% SDS, 200 micrograms/ml sheared and denatured salmon sperm DNA, and 35% formamide, following standard Southern blotting procedures for 12 to 24 hours. The carrier material is finally washed three times each for 15 minutes using 0.2×SSC, 0.2% SDS at 55° C.

[0073] Medium-high stringency conditions: The term “medium-high stringency conditions” means for probes of at least 100 nucleotides in length, prehybridization and hybridization at 42° C. in 5×SSPE, 0.3% SDS, 200 micrograms/ml sheared and denatured salmon sperm DNA, and 35% formamide, following standard Southern blotting procedures for 12 to 24 hours. The carrier material is finally washed three times each for 15 minutes using 0.2×SSC, 0.2% SDS at 60° C.

[0074] Nucleic acid construct: The term “nucleic acid construct” means a polynucleotide comprises one or more (e.g., two, several) control sequences. The polynucleotide may be single-stranded or double-stranded, and may be isolated from a naturally occurring gene, modified to contain segments of nucleic acids in a manner that would not otherwise exist in nature, or synthetic.

[0075] Operably linked: The term “operably linked” means a configuration in which a control sequence is placed at an appropriate position relative to the coding sequence of a polynucleotide such that the control sequence directs expression of the coding sequence.

[0076] Pentose: The term “pentose” means a five-carbon monosaccharide (e.g., xylose, arabinose, ribose, lyxose, ribulose, and xylulose). Pentoses, such as D-xylose and L-arabinose, may be derived, e.g., through saccharification of a plant cell wall polysaccharide.

[0077] Active pentose fermentation pathway: As used herein, a host cell or fermenting organism having an “active pentose fermentation pathway” produces active enzymes necessary to catalyze each reaction of a metabolic pathway in a sufficient amount to produce a fermentation product (e.g., ethanol) from pentose, and therefore is capable of producing the fermentation product in measurable yields when cultivated under fermentation conditions in the presence of pentose. A host cell or fermenting organism having an active pentose fermentation pathway comprises one or more active pentose fermentation pathway genes. A “pentose fermentation pathway gene” as used herein refers to a gene that encodes an enzyme involved in an active pentose fermentation pathway. In some embodiments, the active pentose fermentation pathway is an “active xylose fermentation pathway” (ie produces a fermentation product, such as ethanol, from xylose) or an “active arabinose fermentation pathway (ie produces a fermentation product, such as ethanol, from arabinose).

[0078] The active enzymes necessary to catalyze each reaction in an active pentose fermentation pathway may result from activities of endogenous gene expression, activities of heterologous gene expression, or from a combination of activities of endogenous and heterologous gene expression, as described in more detail herein.

[0079] Phospholipase: The term “phospholipase” means an enzyme that catalyzes the conversion of phospholipids into fatty acids and other lipophilic substances, such as phospholipase A (EC numbers 3.1.1.4, 3.1.1.5 and 3.1.1.32) or phospholipase C (EC numbers 3.1.4.3 and 3.1.4.11). Phospholipase activity may be determined using activity assays known in the art.

[0080] Pretreated corn stover: The term “Pretreated Corn Stover” or “PCS” means a cellulosic-containing material derived from corn stover by treatment with heat and dilute sulfuric acid, alkaline pretreatment, neutral pretreatment, or any pretreatment known in the art.

[0081] Protease: The term “protease” is defined herein as an enzyme that hydrolyses peptide bonds. It includes any enzyme belonging to the EC 3.4 enzyme group (including each of the thirteen subclasses thereof). The EC number refers to Enzyme Nomenclature 1992 from NC-IUBMB, Academic Press, San Diego, Calif., including supplements 1-5 published in Eur. J. Biochem. 223: 1-5 (1994); Eur. J. Biochem. 232: 1-6 (1995); Eur. J. Biochem. 237: 1-5 (1996); Eur. J. Biochem. 250: 1-6 (1997); and Eur. J. Biochem. 264: 610-650 (1999); respectively. The term “subtilases” refer to a sub-group of serine protease according to Siezen et al., 1991, Protein Engng. 4: 719-737 and Siezen et al., 1997, Protein Science 6: 501-523. Serine proteases or serine peptidases is a subgroup of proteases characterised by having a serine in the active site, which forms a covalent adduct with the substrate. Further the subtilases (and the serine proteases) are characterised by having two active site amino acid residues apart from the serine, namely a histidine and an aspartic acid residue. The subtilases may be divided into 6 sub-divisions, i.e. the Subtilisin family, the Thermitase family, the Proteinase K family, the Lantibiotic peptidase family, the Kexin family and the Pyrolysin family. The term “protease activity” means a proteolytic activity (EC 3.4). Protease activity may be determined using methods described in the art (e.g., US 2015/0125925) or using commercially available assay kits (e.g., Sigma-Aldrich).

[0082] Pullulanase: The term “pullulanase” means a starch debranching enzyme having pullulan 6-glucano-hydrolase activity (EC 3.2.1.41) that catalyzes the hydrolysis the α-1,6-glycosidic bonds in pullulan, releasing maltotriose with reducing carbohydrate ends. For purposes of the present invention, pullulanase activity can be determined according to a PHADEBAS assay or the sweet potato starch assay described in WO2016/087237.

[0083] Sequence Identity: The relatedness between two amino acid sequences or between two nucleotide sequences is described by the parameter “sequence identity”.

[0084] For purposes described herein, the degree of sequence identity between two amino acid sequences is determined using the Needleman-Wunsch algorithm (Needleman and Wunsch, J. Mol. Biol. 1970, 48, 443-453) as implemented in the Needle program of the EMBOSS package (EMBOSS: The European Molecular Biology Open Software Suite, Rice et al., Trends Genet 2000, 16, 276-277), preferably version 3.0.0 or later. The optional parameters used are gap open penalty of 10, gap extension penalty of 0.5, and the EBLOSUM62 (EMBOSS version of BLOSUM62) substitution matrix. The output of Needle labeled “longest identity” (obtained using the —nobrief option) is used as the percent identity and is calculated as follows:

(Identical Residues×100)/(Length of the Referenced Sequence−Total Number of Gaps in Alignment)

[0085] For purposes described herein, the degree of sequence identity between two deoxyribonucleotide sequences is determined using the Needleman-Wunsch algorithm (Needleman and Wunsch, 1970, supra) as implemented in the Needle program of the EMBOSS package (EMBOSS: The European Molecular Biology Open Software Suite, Rice et al., 2000, supra), preferably version 3.0.0 or later. The optional parameters used are gap open penalty of 10, gap extension penalty of 0.5, and the EDNAFULL (EMBOSS version of NCBI NUC4.4) substitution matrix. The output of Needle labeled “longest identity” (obtained using the -nobrief option) is used as the percent identity and is calculated as follows:

(Identical Deoxyribonucleotides×100)/(Length of Referenced Sequence−Total Number of Gaps in Alignment)

[0086] Signal peptide: The term “signal peptide” is defined herein as a peptide linked (fused) in frame to the amino terminus of a polypeptide having biological activity and directs the polypeptide into the cell's secretory pathway. Signal sequences may be determined using techniques known in the art (See, e.g., Zhang and Henzel, 2004, Protein Science 13: 2819-2824). The polypeptides described herein may comprise any suitable signal peptide known in the art, or any signal peptide described in U.S. Provisional application No. 62/883,519, filed Aug. 6, 2019 (incorporated herein by reference).

[0087] Trehalase: The term “trehalase” means an enzyme which degrades trehalose into its unit monosaccharides (i.e., glucose). Trehalases are classified in EC 3.2.1.28 (alpha,alpha-trehalase) and EC. 3.2.1.93 (alpha,alpha-phosphotrehalase). The EC classes are based on recommendations of the Nomenclature Committee of the International Union of Biochemistry and Molecular Biology (IUBMB). Description of EC classes can be found on the internet, e.g., on “http://www.expasy.orq/enzyme/”. Trehalases are enzymes that catalyze the following reactions:

EC 3.2.1.28: Alpha,alpha-trehalose+H₂O⇔2 D-glucose;

EC 3.2.1. 93: Alpha,alpha-trehalose 6-phosphate+H₂O⇔D-glucose+D-glucose 6-phosphate.

[0088] Trehalase activity may be determined according to procedures known in the art.

[0089] Very high stringency conditions: The term “very high stringency conditions” means for probes of at least 100 nucleotides in length, prehybridization and hybridization at 42° C. in 5×SSPE, 0.3% SDS, 200 micrograms/ml sheared and denatured salmon sperm DNA, and 50% formamide, following standard Southern blotting procedures for 12 to 24 hours. The carrier material is finally washed three times each for 15 minutes using 0.2×SSC, 0.2% SDS at 70° C.

[0090] Very low stringency conditions: The term “very low stringency conditions” means for probes of at least 100 nucleotides in length, prehybridization and hybridization at 42° C. in 5×SSPE, 0.3% SDS, 200 micrograms/ml sheared and denatured salmon sperm DNA, and 25% formamide, following standard Southern blotting procedures for 12 to 24 hours. The carrier material is finally washed three times each for 15 minutes using 0.2×SSC, 0.2% SDS at 45° C.

[0091] Xylanase: The term “xylanase” means a 1,4-beta-D-xylan-xylohydrolase (E.C. 3.2.1.8) that catalyzes the endohydrolysis of 1,4-beta-D-xylosidic linkages in xylans. Xylanase activity can be determined with 0.2% AZCL-arabinoxylan as substrate in 0.01% TRITON® X-100 and 200 mM sodium phosphate pH 6 at 37° C. One unit of xylanase activity is defined as 1.0 μmole of azurine produced per minute at 37° C., pH 6 from 0.2% AZCL-arabinoxylan as substrate in 200 mM sodium phosphate pH 6.

[0092] Xylose Isomerase: The term “Xylose Isomerase” or “XI” means an enzyme which can catalyze D-xylose into D-xylulose in vivo, and convert D-glucose into D-fructose in vitro. Xylose isomerase is also known as “glucose isomerase” and is classified as E.C. 5.3.1.5. As the structure of the enzyme is very stable, the xylose isomerase is a good model for studying the relationships between protein structure and functions (Karimaki et al., Protein Eng Des Sel, 12004, 17 (12):861-869). Xylose Isomerase activity may be determined using techniques known in the art (e.g., a coupled enzyme assay using D-sorbitol dehygrogenase, as described by Verhoeven et. al., 2017, Sci Rep 7, 46155).

[0093] Reference to “about” a value or parameter herein includes embodiments that are directed to that value or parameter per se. For example, description referring to “about X” includes the embodiment “X”. When used in combination with measured values, “about” includes a range that encompasses at least the uncertainty associated with the method of measuring the particular value, and can include a range of plus or minus two standard deviations around the stated value.

[0094] Likewise, reference to a gene or polypeptide that is “derived from” another gene or polypeptide X, includes the gene or polypeptide X.

[0095] As used herein and in the appended claims, the singular forms “a,” “or,” and “the” include plural referents unless the context clearly dictates otherwise.

[0096] It is understood that the embodiments described herein include “consisting” and/or “consisting essentially of” embodiments. As used herein, except where the context requires otherwise due to express language or necessary implication, the word “comprise” or variations such as “comprises” or “comprising” is used in an inclusive sense, i.e. to specify the presence of the stated features but not to preclude the presence or addition of further features in various embodiments.

### DETAILED DESCRIPTION

[0097] Described herein, inter alia, are host cells/fermention organism, and methods for producing a fermentation product, such as ethanol, from starch or cellulosic containing material. The Applicant has surprisingly found that yeast expressing certain sugar transporters in combination with an active pentose fermentation pathway show remarkably improved utilization of pentose sugars during fermentation.

[0098] In one aspect is a method of producing a fermentation product from a starch-containing or cellulosic-containing material comprising:
[0099] (a) saccharifying the starch-containing or cellulosic-containing material; and
[0100] (b) fermenting the saccharified material of step (a) with a recombinant host cell;

[0101] wherein the host cell comprises an active pentose fermentation pathway and a sugar transporter.

[0102] Steps a) and b) may be carried out either sequentially or simultaneously (SSF). In one embodiment, steps a) and b) are carried out simultaneously (SSF). In another embodiment, steps a) and b) are carried out sequentially.

[0103] In some embodiments of the methods described herein, fermentation of step (b) consumes a greater amount of pentose (e.g., xylose and/or arabinose) e.g., at least 5%, 10%, 15%, 20%, 25%, 30%, 35%, 40%, 45%, 50%, 60%, 75% or 90% more when compared to the method using the same cell without the heterologous polynucleotide encoding a sugar transporter (e.g., under conditions described in Example 2). In some embodiments, more than 65%, e.g., at least 70%, 75%, 80%, 85%, 90%, 95% of pentose (e.g., xylose and/or arabinose) in the medium is consumed.

### Host Cells and Fermenting Organisms

[0104] The host cells and fermenting organisms described herein may be derived from any host cell known to the skilled artisan, such as a cell capable of producing a fermentation product (e.g., ethanol). As used herein, a “derivative” of strain is derived from a referenced strain, such as through mutagenesis, recombinant DNA technology, mating, cell fusion, or cytoduction between yeast strains. Those skilled in the art will understand that the genetic alterations, including metabolic modifications exemplified herein, may be described with reference to a suitable host organism and their corresponding metabolic reactions or a suitable source organism for desired genetic material such as genes for a desired metabolic pathway. However, given the complete genome sequencing of a wide variety of organisms and the high level of skill in the area of genomics, those skilled in the art can apply the teachings and guidance provided herein to other organisms. For example, the metabolic alterations exemplified herein can readily be applied to other species by incorporating the same or analogous encoding nucleic acid from species other than the referenced species.

[0105] The host cells described herein can be from any suitable host, such as a yeast strain, including, but not limited to, a Saccharomyces, Rhodotorula, Schizosaccharomyces, Kluyveromyces, Pichia, Hansenula, Rhodosporidium, Candida, Yarrowia, Lipomyces, Cryptococcus, or Dekkera sp. cell. In particular, Saccharomyces host cells are contemplated, such as Saccharomyces cerevisiae, bayanus or carlsbergensis cells. Preferably, the yeast cell is a Saccharomyces cerevisiae cell. Suitable cells can, for example, be derived from commercially available strains and polyploid or aneuploid industrial strains, including but not limited to those from Superstart™, THERMOSACC®, C5 FUEL™, XyloFerm®, etc. (Lallemand); RED STAR and ETHANOL RED® (Fermentis/Lesaffre); FALI (AB Mauri); Baker's Best Yeast, Baker's Compressed Yeast, etc. (Fleishmann's Yeast); BIOFERM AFT, XP, CF, and XR (North American Bioproducts Corp.); Turbo Yeast (Gert Strand AB); and FERMIOL® (DSM Specialties). Other useful yeast strains are available from biological depositories such as the American Type Culture Collection (ATCC) or the Deutsche Sammlung von Mikroorganismen and Zellkulturen GmbH (DSMZ), such as, e.g., BY4741 (e.g., ATCC 201388); Y108-1 (ATCC PTA.10567) and NRRL YB-1952 (ARS Culture Collection). Still other S. cerevisiae strains suitable as host cells DBY746, [Alpha][Eta]22, 5150-2B, GPY55-15Ba, CEN. PK, USM21, TMB3500, TMB3400, VTT-A-63015, VTT-A-85068, VTT-c-79093 and their derivatives as well as Saccharomyces sp. 1400, 424A (LNH-ST), 259A (LNH-ST) and derivatives thereof. In one embodiment, the recombinant cell is a derivative of a strain Saccharomyces cerevisiae CIBTS1260 (deposited under Accession No. NRRL Y-50973 at the Agricultural Research Service Culture Collection (NRRL), Illinois 61604 U.S.A.).

[0106] The host cell or fermenting organism may be Saccharomyces strain, e.g., Saccharomyces cerevisiae strain produced using the method described and concerned in U.S. Pat. No. 8,257,959-BB.

[0107] The strain may also be a derivative of Saccharomyces cerevisiae strain NMI V14/004037 (See, WO2015/143324 and WO2015/143317 each incorporated herein by reference), strain nos. V15/004035, V15/004036, and V15/004037 (See, WO 2016/153924 incorporated herein by reference), strain nos. V15/001459, V15/001460, V15/001461 (See, WO2016/138437 incorporated herein by reference), strain no. NRRL Y67342 (See, WO2018/098381 incorporated herein by reference), strain nos. NRRL Y67549 and NRRL Y67700 (See, PCT/US2019/018249 incorporated herein by reference), or any strain described in WO2017/087330 (incorporated herein by reference).

[0108] The fermenting organisms according to the invention have been generated in order to, e.g., improve fermentation yield and to improve process economy by cutting enzyme costs since part or all of the necessary enzymes needed to improve method performance are be produced by the fermenting organism.

[0109] The host cells and fermenting organisms described herein may utilize expression vectors comprising the coding sequence of one or more (e.g., two, several) heterologous genes linked to one or more control sequences that direct expression in a suitable cell under conditions compatible with the control sequence(s). Such expression vectors may be used in any of the cells and methods described herein. The polynucleotides described herein may be manipulated in a variety of ways to provide for expression of a desired polypeptide. Manipulation of the polynucleotide prior to its insertion into a vector may be desirable or necessary depending on the expression vector. The techniques for modifying polynucleotides utilizing recombinant DNA methods are well known in the art.

[0110] A construct or vector (or multiple constructs or vectors) comprising the one or more (e.g., two, several) heterologous genes may be introduced into a cell so that the construct or vector is maintained as a chromosomal integrant or as a self-replicating extra-chromosomal vector as described earlier.

[0111] The various nucleotide and control sequences may be joined together to produce a recombinant expression vector that may include one or more (e.g., two, several) convenient restriction sites to allow for insertion or substitution of the polynucleotide at such sites. Alternatively, the polynucleotide(s) may be expressed by inserting the polynucleotide(s) or a nucleic acid construct comprising the sequence into an appropriate vector for expression. In creating the expression vector, the coding sequence is located in the vector so that the coding sequence is operably linked with the appropriate control sequences for expression.

[0112] The recombinant expression vector may be any vector (e.g., a plasmid or virus) that can be conveniently subjected to recombinant DNA procedures and can bring about expression of the polynucleotide. The choice of the vector will typically depend on the compatibility of the vector with the host cell into which the vector is to be introduced. The vector may be a linear or closed circular plasmid.

[0113] The vector may be an autonomously replicating vector, i.e., a vector that exists as an extrachromosomal entity, the replication of which is independent of chromosomal replication, e.g., a plasmid, an extrachromosomal element, a minichromosome, or an artificial chromosome. The vector may contain any means for assuring self-replication. Alternatively, the vector may be one that, when introduced into the host cell, is integrated into the genome and replicated together with the chromosome(s) into which it has been integrated. Furthermore, a single vector or plasmid or two or more vectors or plasmids that together contain the total DNA to be introduced into the genome of the cell, or a transposon, may be used.

[0114] The expression vector may contain any suitable promoter sequence that is recognized by a cell for expression of a gene described herein. The promoter sequence contains transcriptional control sequences that mediate the expression of the polypeptide. The promoter may be any polynucleotide that shows transcriptional activity in the cell of choice including mutant, truncated, and hybrid promoters, and may be obtained from genes encoding extracellular or intracellular polypeptides either homologous or heterologous to the cell.

[0115] Each heterologous polynucleotide described herein may be operably linked to a promoter that is foreign to the polynucleotide. For example, in one embodiment, the nucleic acid construct encoding the fusion protein is operably linked to a promoter foreign to the polynucleotide. The promoters may be identical to or share a high degree of sequence identity (e.g., at least about 80%, at least about 85%, at least about 90%, at least about 95%, at least about 96%, at least about 97%, at least about 98%, or at least about 99%) with a selected native promoter.

[0116] Examples of suitable promoters for directing the transcription of the nucleic acid constructs in a yeast cells, include, but are not limited to, the promoters obtained from the genes for enolase, (e.g., S. cerevisiae enolase or I. orientalis enolase (ENO1)), galactokinase (e.g., S. cerevisiae galactokinase or I. orientalis galactokinase (GAL1)), alcohol dehydrogenase/glyceraldehyde-3-phosphate dehydrogenase (e.g., S. cerevisiae alcohol dehydrogenase/glyceraldehyde-3-phosphate dehydrogenase or I. orientalis alcohol dehydrogenase/glyceraldehyde-3-phosphate dehydrogenase (ADH1, ADH2/GAP)), triose phosphate isomerase (e.g., S. cerevisiae triose phosphate isomerase or I. orientalis triose phosphate isomerase (TPI)), metallothionein (e.g., S. cerevisiae metallothionein or I. orientalis metallothionein (CUP1)), 3-phosphoglycerate kinase (e.g., S. cerevisiae 3-phosphoglycerate kinase or I. orientalis 3-phosphoglycerate kinase (PGK)), PDC1, xylose reductase (XR), xylitol dehydrogenase (XDH), L-(+)-lactate-cytochrome c oxidoreductase (CYB2), translation elongation factor-1 (TEF1), translation elongation factor-2 (TEF2), glyceraldehyde-3-phosphate dehydrogenase (GAPDH), and orotidine 5′-phosphate decarboxylase (URA3) genes. Other suitable promoters may be obtained from S. cerevisiae TDH3, HXT7, PGK1, RPL18B and CCW12 genes. Additional useful promoters for yeast host cells are described by Romanos et al., 1992, Yeast 8: 423-488.

[0117] The control sequence may also be a suitable transcription terminator sequence, which is recognized by a host cell to terminate transcription. The terminator sequence is operably linked to the 3′-terminus of the polynucleotide encoding the polypeptide. Any terminator that is functional in the yeast cell of choice may be used. The terminator may be identical to or share a high degree of sequence identity (e.g., at least about 80%, at least about 85%, at least about 90%, at least about 95%, at least about 96%, at least about 97%, at least about 98%, or at least about 99%) with the selected native terminator.

[0118] Suitable terminators for yeast host cells may be obtained from the genes for enolase (e.g., S. cerevisiae or I. orientalis enolase cytochrome C (e.g., S. cerevisiae or I. orientalis cytochrome (CYC1)), glyceraldehyde-3-phosphate dehydrogenase (e.g., S. cerevisiae or I. orientalis glyceraldehyde-3-phosphate dehydrogenase (gpd)), PDC1, XR, XDH, transaldolase (TAL), transketolase (TKL), ribose 5-phosphate ketol-isomerase (RKI), CYB2, and the galactose family of genes (especially the GAL10 terminator). Other suitable terminators may be obtained from S. cerevisiae ENO2 or TEF1 genes. Additional useful terminators for yeast host cells are described by Romanos et al., 1992, supra.

[0119] The control sequence may also be an mRNA stabilizer region downstream of a promoter and upstream of the coding sequence of a gene which increases expression of the gene.

[0120] Examples of suitable mRNA stabilizer regions are obtained from a Bacillus thuringiensis cryIIIA gene (WO 94/25612) and a Bacillus subtilis SP82 gene (Hue et al., 1995, Journal of Bacteriology 177: 3465-3471).

[0121] The control sequence may also be a suitable leader sequence, when transcribed is a non-translated region of an mRNA that is important for translation by the host cell. The leader sequence is operably linked to the 5′-terminus of the polynucleotide encoding the polypeptide. Any leader sequence that is functional in the yeast cell of choice may be used.

[0122] Suitable leaders for yeast host cells are obtained from the genes for enolase (e.g., S. cerevisiae or I. orientalis enolase (ENO-1)), 3-phosphoglycerate kinase (e.g., S. cerevisiae or I. orientalis 3-phosphoglycerate kinase), alpha-factor (e.g., S. cerevisiae or I. orientalis alpha-factor), and alcohol dehydrogenase/glyceraldehyde-3-phosphate dehydrogenase (e.g., S. cerevisiae or I. orientalis alcohol dehydrogenase/glyceraldehyde-3-phosphate dehydrogenase (ADH2/GAP)).

[0123] The control sequence may also be a polyadenylation sequence; a sequence operably linked to the 3′-terminus of the polynucleotide and, when transcribed, is recognized by the host cell as a signal to add polyadenosine residues to transcribed mRNA. Any polyadenylation sequence that is functional in the host cell of choice may be used. Useful polyadenylation sequences for yeast cells are described by Guo and Sherman, 1995, Mol. Cellular Biol. 15: 5983-5990.

[0124] The control sequence may also be a signal peptide coding region that encodes a signal peptide linked to the N-terminus of a polypeptide and directs the polypeptide into the cell's secretory pathway. The 5′-end of the coding sequence of the polynucleotide may inherently contain a signal peptide coding sequence naturally linked in translation reading frame with the segment of the coding sequence that encodes the polypeptide. Alternatively, the 5′-end of the coding sequence may contain a signal peptide coding sequence that is foreign to the coding sequence. A foreign signal peptide coding sequence may be required where the coding sequence does not naturally contain a signal peptide coding sequence. Alternatively, a foreign signal peptide coding sequence may simply replace the natural signal peptide coding sequence in order to enhance secretion of the polypeptide. However, any signal peptide coding sequence that directs the expressed polypeptide into the secretory pathway of a host cell may be used. Useful signal peptides for yeast host cells are obtained from the genes for Saccharomyces cerevisiae alpha-factor and Saccharomyces cerevisiae invertase. Other useful signal peptide coding sequences are described by Romanos et al., 1992, supra.

[0125] The control sequence may also be a propeptide coding sequence that encodes a propeptide positioned at the N-terminus of a polypeptide. The resultant polypeptide is known as a proenzyme or propolypeptide (or a zymogen in some cases). A propolypeptide is generally inactive and can be converted to an active polypeptide by catalytic or autocatalytic cleavage of the propeptide from the propolypeptide. The propeptide coding sequence may be obtained from the genes for Bacillus subtilis alkaline protease (aprE), Bacillus subtilis neutral protease (nprT), Myceliophthora thermophila laccase (WO 95/33836), Rhizomucor miehei aspartic proteinase, and Saccharomyces cerevisiae alpha-factor.

[0126] Where both signal peptide and propeptide sequences are present, the propeptide sequence is positioned next to the N-terminus of a polypeptide and the signal peptide sequence is positioned next to the N-terminus of the propeptide sequence.

[0127] It may also be desirable to add regulatory sequences that allow the regulation of the expression of the polypeptide relative to the growth of the host cell. Examples of regulatory systems are those that cause the expression of the gene to be turned on or off in response to a chemical or physical stimulus, including the presence of a regulatory compound. Regulatory systems in prokaryotic systems include the lac, tac, and trp operator systems. In yeast, the ADH2 system or GAL1 system may be used.

[0128] The vectors may contain one or more (e.g., two, several) selectable markers that permit easy selection of transformed, transfected, transduced, or the like cells. A selectable marker is a gene the product of which provides for biocide or viral resistance, resistance to heavy metals, prototrophy to auxotrophs, and the like. Suitable markers for yeast host cells include, but are not limited to, ADE2, HIS3, LEU2, LYS2, MET3, TRP1, and URA3.

[0129] The vectors may contain one or more (e.g., two, several) elements that permit integration of the vector into the host cell's genome or autonomous replication of the vector in the cell independent of the genome.

[0130] For integration into the host cell genome, the vector may rely on the polynucleotide's sequence encoding the polypeptide or any other element of the vector for integration into the genome by homologous or non-homologous recombination. Alternatively, the vector may contain additional polynucleotides for directing integration by homologous recombination into the genome of the host cell at a precise location(s) in the chromosome(s). To increase the likelihood of integration at a precise location, the integrational elements should contain a sufficient number of nucleic acids, such as 100 to 10,000 base pairs, 400 to 10,000 base pairs, and 800 to 10,000 base pairs, which have a high degree of sequence identity to the corresponding target sequence to enhance the probability of homologous recombination. The integrational elements may be any sequence that is homologous with the target sequence in the genome of the host cell. Furthermore, the integrational elements may be non-encoding or encoding polynucleotides. On the other hand, the vector may be integrated into the genome of the host cell by non-homologous recombination. Potential integration loci include those described in the art (e.g., See US2012/0135481).

[0131] For autonomous replication, the vector may further comprise an origin of replication enabling the vector to replicate autonomously in the yeast cell. The origin of replication may be any plasmid replicator mediating autonomous replication that functions in a cell. The term “origin of replication” or “plasmid replicator” means a polynucleotide that enables a plasmid or vector to replicate in vivo. Examples of origins of replication for use in a yeast host cell are the 2 micron origin of replication, ARS1, ARS4, the combination of ARS1 and CEN3, and the combination of ARS4 and CEN6.

[0132] More than one copy of a polynucleotide described herein may be inserted into a host cell to increase production of a polypeptide. An increase in the copy number of the polynucleotide can be obtained by integrating at least one additional copy of the sequence into the yeast cell genome or by including an amplifiable selectable marker gene with the polynucleotide where cells containing amplified copies of the selectable marker gene, and thereby additional copies of the polynucleotide, can be selected for by cultivating the cells in the presence of the appropriate selectable agent.

[0133] The procedures used to ligate the elements described above to construct the recombinant expression vectors described herein are well known to one skilled in the art (see, e.g., Sambrook et al., 1989, Molecular Cloning, A Laboratory Manual, 2d edition, Cold Spring Harbor, New York).

[0134] Additional procedures and techniques known in the art for the preparation of recombinant cells for ethanol fermentation, are described in, e.g., WO 2016/045569, the content of which is hereby incorporated by reference.

[0135] The host cell or fermenting organism may be in the form of a composition comprising a host cell or fermenting organism (e.g., a yeast strain described herein) and a naturally occurring and/or a non-naturally occurring component.

[0136] The host cell or fermenting organism described herein may be in any viable form, including crumbled, dry, including active dry and instant, compressed, cream (liquid) form etc. In one embodiment, the host cell or fermenting organism (e.g., a Saccharomyces cerevisiae yeast strain) is dry yeast, such as active dry yeast or instant yeast. In one embodiment, the host cell or fermenting organism (e.g., a Saccharomyces cerevisiae yeast strain) is crumbled yeast. In one embodiment, the host cell or fermenting organism (e.g., a Saccharomyces cerevisiae yeast strain) is compressed yeast. In one embodiment, the host cell or fermenting organism (e.g., a Saccharomyces cerevisiae yeast strain) is cream yeast.

[0137] In one embodiment is a composition comprising a host cell or fermenting organism described herein (e.g., a Saccharomyces cerevisiae yeast strain), and one or more of the component selected from the group consisting of: surfactants, emulsifiers, gums, swelling agent, and antioxidants and other processing aids.

[0138] The compositions described herein may comprise a host cell or fermenting organism described herein (e.g., a Saccharomyces cerevisiae yeast strain) and any suitable surfactants. In one embodiment, the surfactant(s) is/are an anionic surfactant, cationic surfactant, and/or nonionic surfactant.

[0139] The compositions described herein may comprise a host cell or fermenting organism described herein (e.g., a Saccharomyces cerevisiae yeast strain) and any suitable emulsifier. In one embodiment, the emulsifier is a fatty-acid ester of sorbitan. In one embodiment, the emulsifier is selected from the group of sorbitan monostearate (SMS), citric acid esters of monodiglycerides, polyglycerolester, fatty acid esters of propylene glycol.

[0140] In one embodiment, the composition comprises a host cell or fermenting organism described herein (e.g., a Saccharomyces cerevisiae yeast strain), and Olindronal SMS, Olindronal SK, or Olindronal SPL including composition concerned in European Patent No. 1,724,336 (hereby incorporated by reference). These products are commercially available from Bussetti, Austria, for active dry yeast.

[0141] The compositions described herein may comprise a host cell or fermenting organism described herein (e.g., a Saccharomyces cerevisiae yeast strain) and any suitable gum. In one embodiment, the gum is selected from the group of carob, guar, tragacanth, arabic, xanthan and acacia gum, in particular for cream, compressed and dry yeast.

[0142] The compositions described herein may comprise a host cell or fermenting organism described herein (e.g., a Saccharomyces cerevisiae yeast strain) and any suitable swelling agent. In one embodiment, the swelling agent is methyl cellulose or carboxymethyl cellulose.

[0143] The compositions described herein may comprise a host cell or fermenting organism described herein (e.g., a Saccharomyces cerevisiae yeast strain) and any suitable anti-oxidant. In one embodiment, the antioxidant is butylated hydroxyanisol (BHA) and/or butylated hydroxytoluene (BHT), or ascorbic acid (vitamin C), particular for active dry yeast.

### Sugar Transporters

[0144] In some embodiments, the fermenting organism (e.g., recombinant yeast cell) comprises a genetic modification that increases or decreases expression of a sugar transporter. The transporter may be any transporter that is suitable for improving the utilization of pentose of the fermenting organisms having an active pentose fermentation pathway, such as a naturally occurring transporter (e.g., a native transporter from another species or an endogenous transporter expressed from a modified expression vector) or a variant thereof that retains transporter activity.

[0145] Transporter activity can be measured using any suitable assay known in the art, such as improvements in overall consumption of and/or growth rate on arabinose and/or xylose as described in the Examples herein.

[0146] In some embodiments, the genetic modification is a heterologous polynucleotide encoding a sugar transporter.

[0147] In some embodiments, the fermenting organism has an increased level of transporter activity compared to the fermenting organism without the genetic modification, when cultivated under the same conditions. In some embodiments, the fermenting organism has an increased level of transporter activity of at least 5%, e.g., at least 10%, at least 15%, at least 20%, at least 25%, at least 50%, at least 100%, at least 150%, at least 200%, at least 300%, or at 500% compared to the fermenting organism without the genetic modification, when cultivated under the same conditions.

[0148] In some embodiments, the fermenting organism has increased or decreased expression of a sugar transporter when compared to Saccharomyces cerevisiae strain Ethanol Red® (deposited under Accession No. V14/007039 at National Measurement Institute, Victoria, Australia) under the same conditions. In some embodiments, the fermenting organism has an increased expression of at least 5%, e.g., at least 10%, at least 15%, at least 20%, at least 25%, at least 50%, at least 100%, at least 150%, at least 200%, at least 300%, or at 500% compared to Saccharomyces cerevisiae strain Ethanol Red® (deposited under Accession No. V14/007039 at National Measurement Institute, Victoria, Australia) under the same conditions (e.g., under conditions described herein, such as on or after 53 hours fermentation).

[0149] Exemplary sugar transporters that may be expressed with the fermenting organisms and methods of use described herein include, but are not limited to, transporters shown in Table 1 (or derivatives thereof).

TABLE 1

| | | | | Transporter |
|---|---|---|---|---|
| | Description | Gene accession | Gene source | SEQ ID NO. |
| 1 | Sucrose transport protein SUC2 | A0A371ENF9 | Mucuna pruriens | 257 |
| 2 | Putative Sugar transporter | EFP1CHF3L5 | Penicillium brevicompactum | 258 |
| 3 | HXT2 (hexose transporter) protein | BFJ89633 | Saccharomyces cerevisiae | 259 |
| 4 | gxf1p protein | BFJ94472 | Metschnikowia sp | 260 |
| 5 | gxf2p protein | BFJ94474 | Metschnikowia sp | 261 |
| 6 | GntR family transcriptional regulator | A0A2T0LIY3 | Planifilum fimeticola | 262 |
| 7 | Putative Sugar transporter | EFP1C62R7C | Candida boidinii | 263 |
| 8 | Putative Sugar transporter | EFPBZZ6M7 | Zygosaccharomyces kombuchaensis | 264 |
| 9 | Putative Sugar transporter | EFPBZZCJL | Candida haemulonis | 265 |
| 10 | Putative Sugar transporter | EFPBZD7P6 | Spathaspora sp. | 266 |
| 11 | Putative Sugar transporter | EFPBZBQPC | Metschnikowia fructicola | 267 |
| 12 | Putative Sugar transporter | EFPB917WB | Talaromyces adpressus | 268 |
| 13 | MFS domain-containing protein | A0A2H0ZXG4 | Candida auris | 269 |
| 14 | Putative Sugar transporter | EFP9SKDNC | Penicillium tularense | 270 |
| 15 | Putative Sugar transporter | EFP9CLGNG | Meyerozyma caribbica | 271 |
| 16 | GntR family transcriptional regulator | A0A235B4R8 | Paludifilum halophilum | 272 |
| 17 | Putative Sugar transporter | EFP8ZW2C9 | Scheffersomyces stambukii | 273 |
| 18 | Putative Sugar transporter | EFP8DZ469 | Torulaspora microellipsoides | 274 |
| 19 | Putative Sugar transporter | EFP86V2P1 | Morchella semilibera | 275 |
| 20 | Putative Sugar transporter | EFP7WSC34 | Spathaspora boniae | 276 |
| 21 | Putative Sugar transporter | EFP7J7B0Q | llyonectria destructans | 277 |
| 22 | Putative Sugar transporter | EFP7HS9KT | Sugiyamaella xylanicola | 278 |
| 23 | Putative Sugar transporter | EFP7G7KNB | Saccharomycopsis fibuligera | 279 |
| 24 | Putative Sugar transporter | EFP7FXX0N | Yarrowia alimentaria | 280 |
| 25 | Putative Sugar transporter | EFP7FXX0V | Yarrowia alimentaria | 281 |
| 26 | Putative Sugar transporter | EFP7FXWPL | Yarrowia galli | 282 |
| 27 | Putative Sugar transporter | EFP7FXWQF | Yarrowia galli | 283 |
| 28 | Putative Sugar transporter | EFP7FXWHQ | Yarrowia phangngaensis | 284 |
| 29 | — | A0A1G4JE77 | Lachancea meyersii | 285 |
| 30 | — | A0A1G4MBE8 | Lachancea fermentati | 286 |
| 31 | — | A0A1G4MC24 | Lachancea fermentati | 287 |
| 32 | — | A0A1E4T6F0 | Candida arabinofermentans | 288 |
| 33 | Putative Sugar transporter | EFP713NV2 | Kluyveromyces marxianus | 289 |
| 34 | Putative Sugar transporter | EFP6T73D9 | Debaryomyces hansenii | 290 |
| 35 | Putative Sugar transporter | EFP6T7804 | Debaryomyces hansenii | 291 |
| 36 | Putative Sugar transporter | EFP6T76PV | Debaryomyces hansenii | 292 |
| 37 | Putative Sugar transporter | EFP6RQ8JN | Scheffersomyces stipitis | 293 |
| 38 | Putative Sugar transporter | EFP6RN7NJ | Schwanniomyces occidentalis | 294 |
| 39 | Putative Sugar transporter | EFP6PD54N | Wickerhamomyces anomalus | 295 |
| 40 | Putative Sugar transporter | EFP6BNRRN | Lachancea cidri | 296 |
| 41 | Putative Sugar transporter | EFP6BNQR8 | Lachancea cidri | 297 |
| 42 | Putative Sugar transporter | EFP5QXT3D | Yarrowia deformans | 298 |
| 43 | Putative Sugar transporter | EFP5QXVB6 | Yarrowia deformans | 299 |
| 44 | Putative Sugar transporter | EFP5QZ5XB | Yarrowia deformans | 300 |
| 45 | Putative Sugar transporter | EFP5QNR84 | Ambrosiozyma monospora | 301 |
| 46 | Putative Sugar transporter | EFP5Q5H1L | Ogataea methanolica | 302 |
| 47 | Putative Sugar transporter | EFP5NSWCS | Candida succiphila | 303 |
| 48 | Putative Sugar transporter | EFP5NR67S | Candida carpophila | 304 |
| 49 | Putative Sugar transporter | EFP5NRP7F | Candida carpophila | 305 |
| 50 | Putative Sugar transporter | EFP5NNT0L | Wickerhamia fluorescens | 306 |
| 51 | Putative Sugar transporter | EFP5N972X | Priceomyces haplophilus | 307 |
| 52 | High-affinity hexose transporter HXT6 | A0A0W0DYZ4 | Candida glabrata | 308 |
| 53 | Putative Sugar transporter | EFP5FS42L | Candida sojae | 309 |
| 54 | GntR family transcriptional regulator | A0A0U0CXJ1 | Streptococcus pneumoniae | 310 |
| 55 | — | A0A0P1KXV6 | Lachancea quebecensis | 311 |
| 56 | — | A0A0N7MLX3 | Lachancea quebecensis | 312 |
| 57 | GXS1 protein mutant | BBZ79998 | Candida intermedia | 313 |
| 58 | Putative Sugar transporter | EFP401CL1 | Penicillium vulpinum | 314 |
| 59 | Putative Sugar transporter | EFP3TVZL9 | Ogataea methanolica | 315 |
| 60 | Putative Sugar transporter | EFP3TTLXK | Schwanniomyces occidentalis | 316 |
| 61 | Putative Sugar transporter | EFP3FBKC6 | Kluyveromyces marxianus | 317 |
| 62 | Putative Sugar transporter | EFP2C7LS6 | Aspergillus oryzae | 318 |
| 63 | Putative Sugar transporter | EFP1D9FNG | Spathaspora arborariae | 319 |
| 64 | Putative Sugar transporter | EFP14W5DC | Clavispora lusitaniae | 320 |
| 65 | Putative Sugar transporter | EFP12DWXL | Spathaspora passalidarum | 321 |
| 66 | arabinose transporter (AraT) | BAO92398 | Penicillium chrysogenum | 322 |
| 67 | Putative Sugar transporter | EFPN276J | Kluyveromyces wickerhamii | 323 |
| 68 | Putative Sugar transporter | EFPL4075 | Kluyveromyces aestuarii | 324 |
| 69 | HXT10-like protein | J6ECW9 | Saccharomyces kudriavzevii | 325 |
| 70 | HXT6-like protein | J4U468 | Saccharomyces kudriavzevii | 326 |
| 71 | HXT2-like protein | J5S3S1 | Saccharomyces kudriavzevii | 327 |
| 72 | Putative Sugar transporter | EFP4VJQD | Trichophaea saccata | 328 |
| 73 | MFS domain-containing protein | G8ZV29 | Torulaspora delbrueckii | 329 |
| 74 | protein HGT2 | G3AF26 | Spathaspora passalidarum | 330 |
| 75 | GAL2p | D3XDC4 | Saccharomyces kudriavzevii | 331 |
| 76 | Putative L-arabinose transporter | C8TEF4 | Candida arabinofermentans | 332 |
| 77 | — | C5DDE9 | Lachancea thermotolerans | 333 |
| 78 | — | C5DHA8 | Lachancea thermotolerans | 334 |
| 79 | Putative Sugar transporter | ABN64726 | Scheffersomyces stipitis | 335 |
| 80 | Putative Sugar transporter | CAG87483 | Debaryomyces hansenii | 336 |
| 81 | Putative Sugar transporter | AAT95983 | Torulaspora delbrueckii | 337 |
| 82 | Putative Sugar transporter | CAG60202 | Candida glabrata | 338 |
| 83 | Putative Sugar transporter | CAG58441 | Candida glabrata | 339 |
| 84 | Putative Sugar transporter | CAG57753 | Candida glabrata | 340 |
| 85 | PgLAT2 protein | AOD63543 | Pichia guilliermondii | 341 |
| 86 | Sucrose transport protein SUF1 | A3DSX4 | Phaseolus vulgaris | 342 |
| 87 | Sugar transport protein 2 | Q9LNV3 | Arabidopsis thaliana | 343 |
| 88 | — | Q6CD11 | Yarrowia lipolytica | 344 |
| 89 | Arabinose metabolism transcriptional repressor | P96711 | Bacillus subtilis | 345 |
| 90 | High-affinity glucose transporter | P49374 | Kluyveromyces lactis | 346 |
| 91 | Hexose transporter HXT1Q | P43581 | Saccharomyces cerevisiae | 347 |
| 92 | High-affinity hexose transporter HXT7 | P39004 | Saccharomyces cerevisiae | 348 |
| 93 | Hexose transporter HXT9 | P40885 | Saccharomyces cerevisiae | 349 |
| 94 | Putative Sugar transporter | A0A090BHJ4 | Kluyveromyces marxianus | 350 |
| 95 | Putative Sugar transporter | A0A1L0DZ32 | Candida intermedia | 351 |
| 96 | Putative Sugar transporter | A0A0P1KWW5 | Lachancea quebecensis | 352 |
| 97 | Putative Sugar transporter | A1DAC2 | Aspergillus fischeri | 353 |
| 98 | Putative Sugar transporter | A0A1K2I4N4 | Lactobacillus rennini | 354 |
| 99 | Putative Sugar transporter | D7KH13 | Arabidopsis lyrata | 355 |
| 100 | Putative Sugar transporter | A0A1A0HK54 | Metschnikowia bicuspidata | 356 |
| 101 | Putative Sugar transporter | A0A1S2Z5S7 | Cicer arietinum | 357 |
| 102 | — | A0A0L9VMD5 | Vigna angularis | 358 |
| 103 | Sucrose transport protein | A0A1U9X406 | Pisum sativum | 359 |
| 104 | Putative Sugar transporter | A0A1Q2ZT88 | Zygosaccharomyces rouxii | 360 |
| 105 | Putative Sugar transporter | A0A0M0KUB1 | Jeotgalibacillus marinus | 361 |
| 106 | Putative Sugar transporter | A0A202G714 | Clavispora lusitaniae | 362 |
| 107 | Putative Sugar transporter | A0A202G702 | Clavispora lusitaniae | 363 |
| 108 | Putative Sugar transporter | B6HE12 | Penicillium rubens | 364 |
| 109 | Putative Sugar transporter | A0A0D4JCC0 | Saccharomyces cerevisiae | 365 |
| 110 | — | M5P6N0 | Bacillus sonorensis | 366 |
| 111 | Putative Sugar transporter | A0A078DBU3 | Brassica napus | 367 |
| 112 | Putative Sugar transporter | V4KEI8 | Eutrema salsugineum | 368 |
| 113 | Putative Sugar transporter | A0A202G6Z7 | Clavispora lusitaniae | 369 |
| 114 | Putative Sugar transporter | A0A1N6MBZ0 | Yarrowia galli | 370 |
| 115 | Putative Sugar transporter | Q6BV56 | Debaryomyces hansenii | 371 |
| 116 | Putative Sugar transporter | A5DPY9 | Meyerozyma guilliermondii | 372 |
| 117 | Putative Sugar transporter | B1H0U7 | Ambrosiozyma monospora | 373 |
| 118 | Putative Sugar transporter | B2G4F7 | Zygosaccharomyces rouxii | 374 |
| 119 | Putative Sugar transporter | A0A1N6MBV7 | Yarrowia alimentaria | 375 |
| 120 | Putative Sugar transporter | Q6CG69 | Yarrowia lipolytica | 376 |
| 121 | Putative Sugar transporter | R0GW82 | Capsella rubella | 377 |
| 122 | Putative Sugar transporter | A0A087HLR1 | Arabis alpina | 378 |
| 123 | Putative Sugar transporter | B1H0U6 | Ambrosiozyma monospora | 379 |
| 124 | Putative Sugar transporter | K9FYP3 | Penicillium digitatum | 380 |
| 125 | Putative Sugar transporter | EFPC7NHF4 | low complexity metagenome | 381 |
| 126 | Putative Sugar transporter | C4B4V9 | Corynebacterium glutamicum | 382 |
| 127 | Putative Sugar transporter | A0A1L0BAU2 | Candida intermedia | 383 |
| 128 | Putative Sugar transporter | A0A0R1SSI1 | Lactobacillus versmoldensis | 384 |
| 129 | Putative Sugar transporter | A0A1L9U9S9 | Aspergillus brasiliensis | 385 |
| 130 | Putative Sugar transporter | A5DWD7 | Lodderomyces elongisporus | 386 |
| 131 | Putative Sugar transporter | A1C8W7 | Aspergillus clavatus | 387 |
| 132 | Putative Sugar transporter | A0A1Y6JY60 | Lactobacillus zymae | 388 |
| 133 | Putative Sugar transporter | A0A1G4MFR0 | Lachancea fermentati | 389 |
| 134 | Putative Sugar transporter | A0A250WLN4 | Saccharomyces cerevisiae | 390 |
| 135 | Putative Sugar transporter | K0KRN7 | Wickerhamomyces ciferrii | 391 |
| 136 | Putative Sugar transporter | A0A1E4T2R0 | Candida arabinofermentans | 392 |
| 137 | GntR family transcriptional regulator | A0A1Q9FY01 | Bacillus licheniformis | 393 |
| 138 | Putative Sugar transporter | A0A1L0BZU1 | Candida intermedia | 394 |
| 139 | Putative Sugar transporter | A0A0A8KZI3 | Kluyveromyces dobzhanskii | 395 |
| 140 | Putative transporter | EFP70FSPD | Saccharomyces cerevisiae | 396 |
| 141 | Putative transporter | EFP7TC8PR | Saccharomyces cerevisiae | 397 |

[0150] Additional polynucleotides encoding suitable sugar transporters may be derived from microorganisms of any suitable genus, including those readily available within the UniProtKB database (www.uniprot.org).

[0151] The sugar transporter may be a bacterial transporter. For example, the transporter may be derived from a Gram-positive bacterium such as a Bacillus, Clostridium, Enterococcus, Geobacillus, Lactobacillus, Lactococcus, Oceanobacillus, Staphylococcus, Streptococcus, or Streptomyces, or a Gram-negative bacterium such as a Campylobacter, E. coli, Flavobacterium, Fusobacterium, Helicobacter, llyobacter, Neisseria, Pseudomonas, Salmonella, or Ureaplasma.

[0152] In one embodiment, the sugar transporter is derived from Bacillus alkalophilus, Bacillus amyloliquefaciens, Bacillus brevis, Bacillus circulans, Bacillus clausii, Bacillus coagulans, Bacillus firmus, Bacillus lautus, Bacillus lentus, Bacillus licheniformis, Bacillus megaterium, Bacillus pumilus, Bacillus stearothermophilus, Bacillus subtilis, or Bacillus thuringiensis.

[0153] In another embodiment, the sugar transporter is derived from Streptococcus equisimilis, Streptococcus pyogenes, Streptococcus uberis, or Streptococcus equi subsp. Zooepidemicus.

[0154] In another embodiment, the sugar transporter is derived from Streptomyces achromogenes, Streptomyces avermitilis, Streptomyces coelicolor, Streptomyces griseus, or Streptomyces lividans.

[0155] The sugar transporter may be a fungal transporter. For example, the sugar transporter may be derived from a yeast such as a Candida, Kluyveromyces, Pichia, Saccharomyces, Schizosaccharomyces, Yarrowia or Issatchenkia; or derived from a filamentous fungus such as an Acremonium, Agaricus, Alternaria, Aspergillus, Aureobasidium, Botryospaeria, Ceriporiopsis, Chaetomidium, Chrysosporium, Claviceps, Cochliobolus, Coprinopsis, Coptotermes, Corynascus, Cryphonectria, Cryptococcus, Diplodia, Exidia, Filibasidium, Fusarium, Gibberella, Holomastigotoides, Humicola, Irpex, Lentinula, Leptospaeria, Magnaporthe, Melanocarpus, Meripilus, Mucor, Myceliophthora, Neocallimastix, Neurospora, Paecilomyces, Penicillium, Phanerochaete, Piromyces, Poitrasia, Pseudoplectania, Pseudotrichonympha, Rhizomucor, Schizophyllum, Scytalidium, Talaromyces, Thermoascus, Thielavia, Tolypocladium, Trichoderma, Trichophaea, Verticillium, Volvariella, or Xylaria.

[0156] In another embodiment, the sugar transporter is derived from Saccharomyces carlsbergensis, Saccharomyces cerevisiae, Saccharomyces diastaticus, Saccharomyces douglasii, Saccharomyces kluyveri, Saccharomyces norbensis, or Saccharomyces oviformis.

[0157] In another embodiment, the sugar transporter is derived from Acremonium cellulolyticus, Aspergillus aculeatus, Aspergillus awamori, Aspergillus foetidus, Aspergillus fumigatus, Aspergillus japonicus, Aspergillus nidulans, Aspergillus niger, Aspergillus oryzae, Chrysosporium inops, Chrysosporium keratinophilum, Chrysosporium lucknowense, Chrysosporium merdarium, Chrysosporium pannicola, Chrysosporium queenslandicum, Chrysosporium tropicum, Chrysosporium zonatum, Fusarium bactridioides, Fusarium cerealis, Fusarium crookwellense, Fusarium culmorum, Fusarium graminearum, Fusarium graminum, Fusarium heterosporum, Fusarium negundi, Fusarium oxysporum, Fusarium reticulatum, Fusarium roseum, Fusarium sambucinum, Fusarium sarcochroum, Fusarium sporotrichioides, Fusarium sulphureum, Fusarium torulosum, Fusarium trichothecioides, Fusarium venenatum, Humicola grisea, Humicola insolens, Humicola lanuginosa, lrpex lacteus, Mucor miehei, Myceliophthora thermophila, Neurospora crassa, Penicillium funiculosum, Penicillium purpurogenum, Phanerochaete chrysosporium, Thielavia achromatica, Thielavia albomyces, Thielavia albopilosa, Thielavia australeinsis, Thielavia fimeti, Thielavia microspora, Thielavia ovispora, Thielavia peruviana, Thielavia setosa, Thielavia spededonium, Thielavia subthermophila, Thielavia terrestris, Trichoderma harzianum, Trichoderma koningii, Trichoderma longibrachiatum, Trichoderma reesei, or Trichoderma viride.

[0158] It will be understood that for the aforementioned species, the invention encompasses both the perfect and imperfect states, and other taxonomic equivalents, e.g., anamorphs, regardless of the species name by which they are known. Those skilled in the art will readily recognize the identity of appropriate equivalents.

[0159] Strains of these species are readily accessible to the public in a number of culture collections, such as the American Type Culture Collection (ATCC), Deutsche Sammlung von Mikroorganismen and Zellkulturen GmbH (DSMZ), Centraalbureau Voor Schimmelcultures (CBS), and Agricultural Research Service Patent Culture Collection, Northern Regional Research Center (NRRL).

[0160] The sugar transporter coding sequences described or referenced herein, or a subsequence thereof, as well as the transporter described or referenced herein, or a fragment thereof, may be used to design nucleic acid probes to identify and clone DNA encoding a transporter from strains of different genera or species according to methods well known in the art. In particular, such probes can be used for hybridization with the genomic DNA or cDNA of a cell of interest, following standard Southern blotting procedures, in order to identify and isolate the corresponding gene therein. Such probes can be considerably shorter than the entire sequence, but should be at least 15, e.g., at least 25, at least 35, or at least 70 nucleotides in length. Preferably, the nucleic acid probe is at least 100 nucleotides in length, e.g., at least 200 nucleotides, at least 300 nucleotides, at least 400 nucleotides, at least 500 nucleotides, at least 600 nucleotides, at least 700 nucleotides, at least 800 nucleotides, or at least 900 nucleotides in length. Both DNA and RNA probes can be used. The probes are typically labeled for detecting the corresponding gene (for example, with ³²P, ³H, ³⁵S, biotin, or avidin).

[0161] A genomic DNA or cDNA library prepared from such other strains may be screened for DNA that hybridizes with the probes described above and encodes a sugar transporter. Genomic or other DNA from such other strains may be separated by agarose or polyacrylamide gel electrophoresis, or other separation techniques. DNA from the libraries or the separated DNA may be transferred to and immobilized on nitrocellulose or other suitable carrier material. In order to identify a clone or DNA that hybridizes with a coding sequence, or a subsequence thereof, the carrier material is used in a Southern blot.

[0162] In one embodiment, the nucleic acid probe is a polynucleotide, or subsequence thereof, that encodes the sugar transporter of any one of SEQ ID NOs: 257-397, or a fragment thereof.

[0163] For purposes of the probes described above, hybridization indicates that the polynucleotide hybridizes to a labeled nucleic acid probe, or the full-length complementary strand thereof, or a subsequence of the foregoing; under very low to very high stringency conditions. Molecules to which the nucleic acid probe hybridizes under these conditions can be detected using, for example, X-ray film. Stringency and washing conditions are defined as described supra.

[0164] In one embodiment, the sugar transporter is encoded by a polynucleotide that hybridizes under at least low stringency conditions, e.g., medium stringency conditions, medium-high stringency conditions, high stringency conditions, or very high stringency conditions with the full-length complementary strand of the coding sequence for any one of the transporters described or referenced herein (e.g., SEQ ID NOs: 257-397). (Sambrook et al., 1989, Molecular Cloning, A Laboratory Manual, 2d edition, Cold Spring Harbor, New York).

[0165] The sugar transporter may also be identified and obtained from other sources including microorganisms isolated from nature (e.g., soil, composts, water, silage, etc.) or DNA samples obtained directly from natural materials (e.g., soil, composts, water, silage, etc.) using the above-mentioned probes. Techniques for isolating microorganisms and DNA directly from natural habitats are well known in the art. The polynucleotide encoding a sugar transporter may then be derived by similarly screening a genomic or cDNA library of another microorganism or mixed DNA sample.

[0166] Once a polynucleotide encoding a sugar transporter has been detected with a suitable probe as described herein, the sequence may be isolated or cloned by utilizing techniques that are known to those of ordinary skill in the art (See, e.g., Sambrook et al., 1989, supra). Techniques used to isolate or clone polynucleotides encoding transporters include isolation from genomic DNA, preparation from cDNA, or a combination thereof. The cloning of the polynucleotides from such genomic DNA can be affected, e.g., by using the well-known polymerase chain reaction (PCR) or antibody screening of expression libraries to detect cloned DNA fragments with shares structural features (See, e.g., Innis et al., 1990, PCR: A Guide to Methods and Application, Academic Press, New York). Other nucleic acid amplification procedures such as ligase chain reaction (LCR), ligated activated transcription (LAT) and nucleotide sequence-based amplification (NASBA) may be used.

[0167] In one embodiment, the sugar transporter comprises or consists of the amino acid sequence of any one of SEQ ID NOs: 257-397 (such as any one of SEQ ID NOs: 40, 53, 63, 72, 99, 108, 111, 123, 124 and 131; and/or any one of SED ID NOs: 97, 116 and 138). In another embodiment, the transporter is a fragment of the transporter of any one of SEQ ID NOs: 257-397 (such as any one of SEQ ID NOs: 40, 53, 63, 72, 99, 108, 111, 123, 124 and 131; and/or any one of SED ID NOs: 97, 116 and 138), wherein, e.g., the fragment has transporter activity. In one embodiment, the number of amino acid residues in the fragment is at least 75%, e.g., at least 80%, 85%, 90%, or 95% of the number of amino acid residues in referenced full length transporter (e.g. any one of SEQ ID NOs: 257-397; such as any one of SEQ ID NOs: 40, 53, 63, 72, 99, 108, 111, 123, 124 and 131; and/or any one of SED ID NOs: 97, 116 and 138)). In other embodiments, the transporter may comprise the catalytic domain of any transporter described or referenced herein (e.g., the catalytic domain of any one of SEQ ID NOs: 257-397; such as any one of SEQ ID NOs: 40, 53, 63, 72, 99, 108, 111, 123, 124 and 131; and/or any one of SED ID NOs: 97, 116 and 138).

[0168] The transporter may be a variant of any one of the transporter described supra (e.g., any one of SEQ ID NOs: 257-397; such as any one of SEQ ID NOs: 40, 53, 63, 72, 99, 108, 111, 123, 124 and 131; and/or any one of SED ID NOs: 97, 116 and 138). In one embodiment, the transporter has at least 60%, e.g., at least 65%, 70%, 75%, 80%, 85%, 90%, 95%, 97%, 98%, 99%, or 100% sequence identity to any one of the transporters described supra (e.g., any one of SEQ ID NOs: 257-397; such as any one of SEQ ID NOs: 40, 53, 63, 72, 99, 108, 111, 123, 124 and 131; and/or any one of SED ID NOs: 97, 116 and 138).

[0169] In one embodiment, the transporter sequence differs by no more than ten amino acids, e.g., by no more than five amino acids, by no more than four amino acids, by no more than three amino acids, by no more than two amino acids, or by one amino acid from the amino acid sequence of any one of the transportera described supra (e.g., any one of SEQ ID NOs: 257-397; such as any one of SEQ ID NOs: 40, 53, 63, 72, 99, 108, 111, 123, 124 and 131; and/or any one of SED ID NOs: 97, 116 and 138). In one embodiment, the transporter has an amino acid substitution, deletion, and/or insertion of one or more (e.g., two, several) of amino acid sequence of any one of the transporters described supra (e.g., any one of SEQ ID NOs: 257-397; such as any one of SEQ ID NOs: 40, 53, 63, 72, 99, 108, 111, 123, 124 and 131; and/or any one of SED ID NOs: 97, 116 and 138). In some embodiments, the total number of amino acid substitutions, deletions and/or insertions is not more than 10, e.g., not more than 9, 8, 7, 6, 5, 4, 3, 2, or 1.

[0170] In some embodiments, the sugar transporter is not the transporter having a mature polypeptide sequence of SEQ ID NO: 390 (or a transporter having a mature polypeptide sequence with at least 80%, e.g., at least 85%, 90%, 95%, 97%, 98%, or 99% sequence identity to the transporter of SEQ ID NO: 390).

[0171] The amino acid changes are generally of a minor nature, that is conservative amino acid substitutions or insertions that do not significantly affect the folding and/or activity of the protein; small deletions, typically of one to about 30 amino acids; small amino-terminal or carboxyl-terminal extensions, such as an amino-terminal methionine residue; a small linker peptide of up to about 20-25 residues; or a small extension that facilitates purification by changing net charge or another function, such as a poly-histidine tract, an antigenic epitope or a binding domain.

[0172] Examples of conservative substitutions are within the group of basic amino acids (arginine, lysine and histidine), acidic amino acids (glutamic acid and aspartic acid), polar amino acids (glutamine and asparagine), hydrophobic amino acids (leucine, isoleucine and valine), aromatic amino acids (phenylalanine, tryptophan and tyrosine), and small amino acids (glycine, alanine, serine, threonine and methionine). Amino acid substitutions that do not generally alter specific activity are known in the art and are described, for example, by H. Neurath and R. L. Hill, 1979, In, The Proteins, Academic Press, New York. The most commonly occurring exchanges are Ala/Ser, Val/Ile, Asp/Glu, Thr/Ser, Ala/Gly, Ala/Thr, Ser/Asn, Ala/Val, Ser/Gly, Tyr/Phe, Ala/Pro, Lys/Arg, Asp/Asn, Leu/Ile, Leu/Val, Ala/Glu, and Asp/Gly.

[0173] Alternatively, the amino acid changes are of such a nature that the physico-chemical properties of the polypeptides are altered. For example, amino acid changes may improve the thermal stability of the transporters, alter the substrate specificity, change the pH optimum, and the like.

[0174] Essential amino acids can be identified according to procedures known in the art, such as site-directed mutagenesis or alanine-scanning mutagenesis (Cunningham and Wells, 1989, Science 244: 1081-1085). In the latter technique, single alanine mutations are introduced at every residue in the molecule, and the resultant mutant molecules are tested for activity to identify amino acid residues that are critical to the activity of the molecule. See also, Hilton et al., 1996, J. Biol. Chem. 271: 4699-4708. The active site or other biological interaction can also be determined by physical analysis of structure, as determined by such techniques as nuclear magnetic resonance, crystallography, electron diffraction, or photoaffinity labeling, in conjunction with mutation of putative contact site amino acids (See, for example, de Vos et al., 1992, Science 255: 306-312; Smith et al., 1992, J. Mol. Biol. 224: 899-904; Wlodaver et al., 1992, FEBS Lett. 309: 59-64). The identities of essential amino acids can also be inferred from analysis of identities with other sugar transporters that are related to the referenced transporter.

[0175] Additional guidance on the structure-activity relationship of the transporters herein can be determined using multiple sequence alignment (MSA) techniques well-known in the art. Based on the teachings herein, the skilled artisan could make similar alignments with any number of transporters described herein or known in the art. Such alignments aid the skilled artisan to determine potentially relevant domains (e.g., binding domains or catalytic domains), as well as which amino acid residues are conserved and not conserved among the different transporter sequences. It is appreciated in the art that changing an amino acid that is conserved at a particular position between disclosed polypeptides will more likely result in a change in biological activity (Bowie et al., 1990, Science 247: 1306-1310: “Residues that are directly involved in protein functions such as binding or catalysis will certainly be among the most conserved”). In contrast, substituting an amino acid that is not highly conserved among the polypeptides will not likely or significantly alter the biological activity.

[0176] Even further guidance on the structure-activity relationship for the skilled artisan can be found in published x-ray crystallography studies known in the art. As noted supra, additional characterization of AAAPs are described, e.g., Young et al., 1999, Biochimica et Biophysica Acta 1415: 306-322. Structure-function analysis is also described, e.g., Swarup et al., 2004, The Plant Cell, 16:3069-3083.

[0177] Single or multiple amino acid substitutions, deletions, and/or insertions can be made and tested using known methods of mutagenesis, recombination, and/or shuffling, followed by a relevant screening procedure, such as those disclosed by Reidhaar-Olson and Sauer, 1988, Science 241: 53-57; Bowie and Sauer, 1989, Proc. Natl. Acad. Sci. USA 86: 2152-2156; WO95/17413; or WO95/22625. Other methods that can be used include error-prone PCR, phage display (e.g., Lowman et al., 1991, Biochemistry 30: 10832-10837; U.S. Pat. No. 5,223,409; WO92/06204), and region-directed mutagenesis (Derbyshire et al., 1986, Gene 46: 145; Ner et al., 1988, DNA 7: 127).

[0178] Mutagenesis/shuffling methods can be combined with high-throughput, automated screening methods to detect activity of cloned, mutagenized polypeptides expressed by host cells (Ness et al., 1999, Nature Biotechnology 17: 893-896). Mutagenized DNA molecules that encode active transporters can be recovered from the host cells and rapidly sequenced using standard methods in the art. These methods allow the rapid determination of the importance of individual amino acid residues in a polypeptide.

[0179] In another embodiment, the heterologous polynucleotide encoding the sugar transporter comprises a coding sequence having at least 60%, e.g., at least 65%, at least 70%, at least 75%, at least 80%, at least 85%, at least 90%, at least 95%, at least 96%, at least 97%, at least 98%, at least 99%, or 100% sequence identity to the coding sequence of any one of the transporters described supra (e.g., any one of SEQ ID NOs: 257-397; such as any one of SEQ ID NOs: 40, 53, 63, 72, 99, 108, 111, 123, 124 and 131; and/or any one of SED ID NOs: 97, 116 and 138).

[0180] In one embodiment, the heterologous polynucleotide encoding the sugar transporter comprises or consists of the coding sequence of any one of the transporters described supra (e.g., any one of SEQ ID NOs: 257-397; such as any one of SEQ ID NOs: 40, 53, 63, 72, 99, 108, 111, 123, 124 and 131; and/or any one of SED ID NOs: 97, 116 and 138). In another embodiment, the heterologous polynucleotide encoding the sugar transporter comprises a subsequence of the coding sequence of any one of the transporters described supra (e.g., any one of SEQ ID NOs: 257-397; such as any one of SEQ ID NOs: 40, 53, 63, 72, 99, 108, 111, 123, 124 and 131; and/or any one of SED ID NOs: 97, 116 and 138) wherein the subsequence encodes a polypeptide having transporter activity. In another embodiment, the number of nucleotides residues in the coding subsequence is at least 75%, e.g., at least 80%, 85%, 90%, or 95% of the number of the referenced coding sequence.

[0181] The referenced coding sequence of any related aspect or embodiment described herein can be the native coding sequence or a degenerate sequence, such as a codon-optimized coding sequence designed for use in a particular host cell (e.g., optimized for expression in Saccharomyces cerevisiae).

[0182] The sugar transporter may be a fused polypeptide or cleavable fusion polypeptide in which another polypeptide is fused at the N-terminus or the C-terminus of the transporter. A fused polypeptide may be produced by fusing a polynucleotide encoding another polypeptide to a polynucleotide encoding the transporter. Techniques for producing fusion polypeptides are known in the art, and include ligating the coding sequences encoding the polypeptides so that they are in frame and that expression of the fused polypeptide is under control of the same promoter(s) and terminator. Fusion proteins may also be constructed using intein technology in which fusions are created post-translationally (Cooper et al., 1993, EMBO J. 12: 2575-2583; Dawson et al., 1994, Science 266: 776-779).

[0183] In some embodiments, the sugar transporter is a fusion protein comprising a signal peptide linked to the N-terminus of a mature polypeptide, such as any signal sequences described in U.S. Provisional Application No. 62/883,519 filed Aug. 6, 2019 and entitled “Fusion Proteins For Improved Enzyme Expression” (the content of which is hereby incorporated by reference).

### Non-Phosphorylating NADP-Dependent Glyceraldehyde-3-Phosphate Dehydrogenases (GAPNs)

[0184] The host cells and fermenting organisms may express a heterologous NADP-dependent glyceraldehyde-3-phosphate dehydrogenase (GAPN). The GAPN can be any GAPN that is suitable for the host cells and their methods of use described herein, such as a naturally occurring GAPN (e.g., an endogenous GAPN or a native GAPN from another species) or a variant thereof that retains GAPN activity. In one aspect, GAPN is present in the cytosol of the host cells.

[0185] In some embodiments, the host cell or fermenting organism comprises a heterologous polynucleotide encoding a GAPN. In some embodiments, the host cell or fermenting organism comprising a heterologous polynucleotide encoding a GAPN has an increased level of GAPN activity compared to the host cell or fermenting organism without the heterologous polynucleotide encoding the GAPN, when cultivated under the same conditions. In some embodiments, the host cell or fermenting organism has an increased level of GAPN activity of at least 5%, e.g., at least 10%, at least 15%, at least 20%, at least 25%, at least 50%, at least 100%, at least 150%, at least 200%, at least 300%, or at 500% compared to host cell or fermenting organism without the heterologous polynucleotide encoding the GAPN, when cultivated under the same conditions.

[0186] Exemplary GAPNs that may be expressed with the host cells or fermenting organisms and methods of use described herein include, but are not limited to, GAPNs shown in Table 2 (or derivatives thereof).

TABLE 2

| | Donor Organism | Sequence code | SEQ ID NO. |
|---|---|---|---|
| 1 | Triticum aestivum | Q8LK61 | 407 |
| 2 | Chlamydomonas reinhardtii | A0A2K3D5S6 | 408 |
| 3 | Apium graveolens | Q9SNX8 | 409 |
| 4 | Cicer arietinum | A0A1S2YP36 | 410 |
| 5 | Bacillus pseudomycoides | A0A2C4I5G8 | 411 |
| 6 | Streptococcus equinus | Q3C1A6 | 412 |
| 7 | Glycine soja | A0A0B2QEZ3 | 413 |
| 8 | Streptococcus sp. DD12 | A0A139NKR4 | 414 |
| 9 | Bacillus thuringiensis | A0A0B5NZK7 | 415 |
| 10 | Arabidopsis thaliana | Q1WIQ6 | 416 |
| 11 | Bacillus litoralis | EFP8C9GVR | 417 |
| 12 | Streptococcus hyointestinalis | A0A380K8A8 | 418 |
| 13 | Zea mays | Q43272 | 419 |
| 14 | Lactobacillus delbrueckii | Q04A83 | 420 |
| 15 | Streptococcus pluranimalium | A0A2L0D390 | 421 |
| 16 | Nicotiana plumbaginifolia | P93338 | 422 |
| 17 | Streptococcus macacae | G5JUQ8 | 423 |
| 18 | Streptococcus mutans | Q59931 | 424 |
| 19 | Bacillus cereus | | 425 |
| 20 | Streptococcus thermophilus | | 426 |
| 21 | Streptococcus urinalis | | 427 |
| 22 | Streptococcus canis | | 428 |
| 23 | Streptococcus thoraltensis | | 429 |
| 24 | Streptococcus dysgalactiae | | 430 |
| 25 | Streptococcus pyogenes | | 431 |
| 26 | Streptococcus ictaluri | | 432 |
| 27 | Clostridium perfringens | | 433 |
| 28 | Clostridium chromiireducens | | 434 |
| 29 | Clostridium botulinum | | 435 |
| 30 | Bacillus anthracis | | 436 |
| 31 | Pyrococcus furiosus | | 437 |

[0187] Additional polynucleotides encoding suitable GAPNs may be derived from microorganisms of any suitable genus, including those readily available within the UniProtKB database (www.uniprot.org).

[0188] The GAPN coding sequences can also be used to design nucleic acid probes to identify and clone DNA encoding proteases from strains of different genera or species, as described supra.

[0189] The polynucleotides encoding GAPNs may also be identified and obtained from other sources including microorganisms isolated from nature (e.g., soil, composts, water, etc.) or DNA samples obtained directly from natural materials (e.g., soil, composts, water, etc.) as described supra.

[0190] Techniques used to isolate or clone polynucleotides encoding GAPNs are described supra.

[0191] In one embodiment, the GAPN has a mature polypeptide sequence that comprises or consists of the amino acid sequence of any one of SEQ ID NOs: 407-437. In another embodiment, the GAPN has a mature polypeptide sequence that is a fragment of the GAPN of any one of SEQ ID NOs: 407-437 (e.g., wherein the fragment has GAPN activity). In one embodiment, the number of amino acid residues in the fragment is at least 75%, e.g., at least 80%, 85%, 90%, or 95% of the number of amino acid residues in referenced full length GAPN (e.g. any one of SEQ ID NOs: 407-437). In other embodiments, the GAPN may comprise the catalytic domain of any GAPN described or referenced herein (e.g., the catalytic domain of any one of SEQ ID NOs: 407-437).

[0192] The GAPN may be a variant of any one of the GAPNs described supra (e.g., any one of SEQ ID NOs: 407-437). In one embodiment, the GAPN has a mature polypeptide sequence of at least 60%, e.g., at least 65%, 70%, 75%, 80%, 85%, 90%, 95%, 97%, 98%, 99%, or 100% sequence identity to any one of the GAPNs described supra (e.g., any one of SEQ ID NOs: 407-437).

[0193] Examples of suitable amino acid changes, such as conservative substitutions that do not significantly affect the folding and/or activity of the GAPN, are described supra.

[0194] In one embodiment, the GAPN has a mature polypeptide sequence that differs by no more than ten amino acids, e.g., by no more than five amino acids, by no more than four amino acids, by no more than three amino acids, by no more than two amino acids, or by one amino acid from the amino acid sequence of any one of the GAPN described supra (e.g., any one of SEQ ID NOs: 407-437). In one embodiment, the GAPN has an amino acid substitution, deletion, and/or insertion of one or more (e.g., two, several) of amino acid sequence of any one of the GAPNs described supra (e.g., any one of SEQ ID NOs: 407-437). In some embodiments, the total number of amino acid substitutions, deletions and/or insertions is not more than 10, e.g., not more than 9, 8, 7, 6, 5, 4, 3, 2, or 1.

[0195] In one embodiment, the GAPN coding sequence hybridizes under at least low stringency conditions, e.g., medium stringency conditions, medium-high stringency conditions, high stringency conditions, or very high stringency conditions with the full-length complementary strand of the coding sequence from any GAPN described or referenced herein (e.g., any one of SEQ ID NOs: 407-437). In one embodiment, the GAPN coding sequence has at least 65%, e.g., at least 70%, at least 75%, at least 80%, at least 85%, at least 85%, at least 90%, at least 91%, at least 92%, at least 93%, at least 94%, at least 95%, at least 96%, at least 97%, at least 98%, at least 99%, or 100% sequence identity with the coding sequence from any GAPN described or referenced herein (e.g., any one of SEQ ID NOs: 407-437).

[0196] In one embodiment, the GAPN comprises the coding sequence of any GAPN described or referenced herein (any one of SEQ ID NOs: 407-437). In one embodiment, the GAPN comprises a coding sequence that is a subsequence of the coding sequence from any GAPN described or referenced herein, wherein the subsequence encodes a polypeptide having GAPN activity. In one embodiment, the number of nucleotides residues in the subsequence is at least 75%, e.g., at least 80%, 85%, 90%, or 95% of the number of the referenced coding sequence.

[0197] The referenced GAPN coding sequence of any related aspect or embodiment described herein can be the native coding sequence or a degenerate sequence, such as a codon-optimized coding sequence designed for use in a particular host cell (e.g., optimized for expression in Saccharomyces cerevisiae).

[0198] The GAPN can also include fused polypeptides or cleavable fusion polypeptides, as described supra.

### Glucoamylases

[0199] The host cells and fermenting organisms may express a heterologous glucoamylase. The glucoamylase can be any glucoamylase that is suitable for the host cells, fermenting organisms and/or their methods of use described herein, such as a naturally occurring glucoamylase or a variant thereof that retains glucoamylase activity. Any glucoamylase contemplated for expression by a host cell or fermenting organism described below is also contemplated for embodiments of the invention involving exogenous addition of a glucoamylase (e.g., added before, during or after liquefaction and/or saccharification).

[0200] In some embodiments, the host cell or fermenting organism comprises a heterologous polynucleotide encoding a glucoamylase, for example, as described in WO2017/087330, the content of which is hereby incorporated by reference. Any glucoamylase described or referenced herein is contemplated for expression in the host cell or fermenting organism.

[0201] In some embodiments, the host cell or fermenting organism comprising a heterologous polynucleotide encoding a glucoamylase has an increased level of glucoamylase activity compared to the host cells without the heterologous polynucleotide encoding the glucoamylase, when cultivated under the same conditions. In some embodiments, the host cell or fermenting organism has an increased level of glucoamylase activity of at least 5%, e.g., at least 10%, at least 15%, at least 20%, at least 25%, at least 50%, at least 100%, at least 150%, at least 200%, at least 300%, or at 500% compared to the host cell or fermenting organism without the heterologous polynucleotide encoding the glucoamylase, when cultivated under the same conditions.

[0202] Exemplary glucoamylases that can be used with the host cells and/or the methods described herein include bacterial, yeast, or filamentous fungal glucoamylases, e.g., obtained from any of the microorganisms described or referenced herein, as described supra.

[0203] Preferred glucoamylases are of fungal or bacterial origin, selected from the group consisting of Aspergillus glucoamylases, in particular Aspergillus niger G1 or G2 glucoamylase (Boel et al. (1984), EM BO J. 3 (5), p. 1097-1102), or variants thereof, such as those disclosed in WO 92/00381, WO 00/04136 and WO 01/04273 (from Novozymes, Denmark); the A. awamori glucoamylase disclosed in WO 84/02921, Aspergillus oryzae glucoamylase (Agric. Biol. Chem. (1991), 55 (4), p. 941-949), or variants or fragments thereof. Other Aspergillus glucoamylase variants include variants with enhanced thermal stability: G137A and G139A (Chen et al. (1996), Prot. Eng. 9, 499-505); D257E and D293E/Q (Chen et al. (1995), Prot. Eng. 8, 575-582); N182 (Chen et al. (1994), Biochem. J. 301, 275-281); disulphide bonds, A246C (Fierobe et al. (1996), Biochemistry, 35, 8698-8704; and introduction of Pro residues in position A435 and S436 (Li et al. (1997), Protein Eng. 10, 1199-1204.

[0204] Other glucoamylases include Athelia rolfsii (previously denoted Corticium rolfsii) glucoamylase (see U.S. Pat. No. 4,727,026 and (Nagasaka et al. (1998) “Purification and properties of the raw-starch-degrading glucoamylases from Corticium rolfsii, Appl Microbiol Biotechnol 50:323-330), Talaromyces glucoamylases, in particular derived from Talaromyces emersonii (WO 99/28448), Talaromyces leycettanus (U.S. Pat. No. Re. 32,153), Talaromyces duponti, Talaromyces thermophilus (U.S. Pat. No. 4,587,215). In one embodiment, the glucoamylase used during saccharification and/or fermentation is the Talaromyces emersonii glucoamylase disclosed in WO 99/28448 or the Talaromyces emersonii glucoamylase of SEQ ID NO: 247.

[0205] Bacterial glucoamylases contemplated include glucoamylases from the genus Clostridium, in particular C. thermoamylolyticum (EP 135,138), and C. thermohydrosulfuricum (WO 86/01831).

[0206] Contemplated fungal glucoamylases include Trametes cingulate, Pachykytospora papyracea; and Leucopaxillus giganteus all disclosed in WO 2006/069289; or Peniophora rufomarginata disclosed in WO2007/124285; or a mixture thereof. Also hybrid glucoamylase are contemplated. Examples include the hybrid glucoamylases disclosed in WO 2005/045018.

[0207] In one embodiment, the glucoamylase is derived from a strain of the genus Pycnoporus, in particular a strain of Pycnoporus as described in WO 2011/066576 (SEQ ID NO: 2, 4 or 6 therein), including the Pycnoporus sanguineus glucoamylase, or from a strain of the genus Gloeophyllum, such as a strain of Gloeophyllum sepiarium or Gloeophyllum trabeum, in particular a strain of Gloeophyllum as described in WO 2011/068803 (SEQ ID NO: 2, 4, 6, 8, 10, 12, 14 or 16 therein). In one embodiment, the glucoamylase is SEQ ID NO: 2 in WO 2011/068803 (i.e. Gloeophyllum sepiarium glucoamylase). In one embodiment, the glucoamylase is the Gloeophyllum sepiarium glucoamylase of SEQ ID NO: 8. In one embodiment, the glucoamylase is the Pycnoporus sanguineus glucoamylase of SEQ ID NO: 229.

[0208] In one embodiment, the glucoamylase is a Gloeophyllum trabeum glucoamylase (disclosed as SEQ ID NO: 3 in WO2014/177546). In another embodiment, the glucoamylase is derived from a strain of the genus Nigrofomes, in particular a strain of Nigrofomes sp. disclosed in WO 2012/064351 (disclosed as SEQ ID NO: 2 therein).

[0209] Also contemplated are glucoamylases with a mature polypeptide sequence which exhibit a high identity to any of the above mentioned glucoamylases, i.e., at least 60%, such as at least 70%, at least 75%, at least 80%, at least 85%, at least 90%, at least 95%, at least 96%, at least 97%, at least 98%, at least 99% or even 100% identity to any one of the mature polypeptide sequences mentioned above.

[0210] Glucoamylases may be added to the saccharification and/or fermentation in an amount of 0.0001-20 AGU/g DS, such as 0.001-10 AGU/g DS, 0.01-5 AGU/g DS, or 0.1-2 AGU/g DS.

[0211] Glucoamylases may be added to the saccharification and/or fermentation in an amount of 1-1,000 μg EP/g DS, such as 10-500 μg/gDS, or 25-250 μg/g DS.

[0212] Glucoamylases may be added to liquefaction in an amount of 0.1-100 μg EP/g DS, such as 0.5-50 μg EP/g DS, 1-25 μg EP/g DS, or 2-12 μg EP/g DS.

[0213] In one embodiment, the glucoamylase is added as a blend further comprising an alpha-amylase (e.g., any alpha-amylase described herein). In one embodiment, the alpha-amylase is a fungal alpha-amylase, especially an acid fungal alpha-amylase. The alpha-amylase is typically a side activity.

[0214] In one embodiment, the glucoamylase is a blend comprising Talaromyces emersonii glucoamylase disclosed in WO 99/28448 as SEQ ID NO: 34 and Trametes cingulata glucoamylase disclosed as SEQ ID NO: 2 in WO 06/069289.

[0215] In one embodiment, the glucoamylase is a blend comprising Talaromyces emersonii glucoamylase disclosed in WO 99/28448, Trametes cingulata glucoamylase disclosed as SEQ ID NO: 2 in WO 06/69289, and an alpha-amylase.

[0216] In one embodiment, the glucoamylase is a blend comprising Talaromyces emersonii glucoamylase disclosed in WO99/28448, Trametes cingulata glucoamylase disclosed in WO 06/69289, and Rhizomucor pusillus alpha-amylase with Aspergillus niger glucoamylase linker and SBD disclosed as V039 in Table 5 in WO 2006/069290.

[0217] In one embodiment, the glucoamylase is a blend comprising Gloeophyllum sepiarium glucoamylase shown as SEQ ID NO: 2 in WO 2011/068803 and an alpha-amylase, in particular Rhizomucor pusillus alpha-amylase with an Aspergillus niger glucoamylase linker and starch-binding domain (SBD), disclosed SEQ ID NO: 3 in WO 2013/006756, in particular with the following substitutions: G128D+D143N.

[0218] In one embodiment, the alpha-amylase may be derived from a strain of the genus Rhizomucor, preferably a strain the Rhizomucor pusillus, such as the one shown in SEQ ID NO: 3 in WO2013/006756, or the genus Meripilus, preferably a strain of Meripilus giganteus. In one embodiment, the alpha-amylase is derived from a Rhizomucor pusillus with an Aspergillus niger glucoamylase linker and starch-binding domain (SBD), disclosed as V039 in Table 5 in WO 2006/069290.

[0219] In one embodiment, the Rhizomucor pusillus alpha-amylase or the Rhizomucor pusillus alpha-amylase with an Aspergillus niger glucoamylase linker and starch-binding domain (SBD) has at least one of the following substitutions or combinations of substitutions: D165M; Y141W; Y141R; K136F; K192R; P224A; P224R; S123H+Y141W; G20S+Y141W; A76G+Y141W; G128D+Y141W; G128D+D143N; P219C+Y141W; N142D+D143N; Y141W+K192R; Y141W+D143N; Y141W+N383R; Y141W+P219C+A265C; Y141W+N142D+D143N; Y141W+K192R V410A; G128D+Y141W+D143N; Y141W+D143N+P219C; Y141W+D143N+K192R; G128D+D143N+K192R; Y141W+D143N+K192R+P219C; and G128D+Y141W+D143N+K192R; or G128D+Y141W+D143N+K192R+P219C (using SEQ ID NO: 3 in WO 2013/006756 for numbering).

[0220] In one embodiment, the glucoamylase blend comprises Gloeophyllum sepiarium glucoamylase (e.g., SEQ ID NO: 2 in WO 2011/068803) and Rhizomucor pusillus alpha-amylase.

[0221] In one embodiment, the glucoamylase blend comprises Gloeophyllum sepiarium glucoamylase shown as SEQ ID NO: 2 in WO 2011/068803 and Rhizomucor pusillus with an Aspergillus niger glucoamylase linker and starch-binding domain (SBD), disclosed SEQ ID NO: 3 in WO 2013/006756 with the following substitutions: G128D+D143N.

[0222] Commercially available compositions comprising glucoamylase include AMG 200L; AMG 300 L; SANT™ SUPER, SAN™ EXTRA L, SPIRIZYME® PLUS, SPIRIZYME® FUEL, SPIRIZYME® B4U, SPIRIZYME® ULTRA, SPIRIZYME® EXCEL, SPIRIZYME ACHIEVE®, and AMG® E (from Novozymes A/S); OPTIDEX™ 300, GC480, GC417 (from DuPont-Danisco); AMIGASE™ and AMIGASE™ PLUS (from DSM); G-ZYME™ G900, G-ZYME™ and G990 ZR (from DuPont-Danisco).

[0223] In one embodiment, the glucoamylase is derived from the Debaryomyces occidentalis glucoamylase of SEQ ID NO: 102. In one embodiment, the glucoamylase is derived from the Saccharomycopsis fibuligera glucoamylase of SEQ ID NO: 103. In one embodiment, the glucoamylase is derived from the Saccharomycopsis fibuligera glucoamylase of SEQ ID NO: 104. In one embodiment, the glucoamylase is derived from the Saccharomyces cerevisiae glucoamylase of SEQ ID NO: 105. In one embodiment, the glucoamylase is derived from the Aspergillus niger glucoamylase of SEQ ID NO: 106. In one embodiment, the glucoamylase is derived from the Aspergillus oryzae glucoamylase of SEQ ID NO: 107. In one embodiment, the glucoamylase is derived from the Rhizopus oryzae glucoamylase of SEQ ID NO: 108 or SEQ ID NO: 250. In one embodiment, the glucoamylase is derived from the Clostridium thermocellum glucoamylase of SEQ ID NO: 109. In one embodiment, the glucoamylase is derived from the Clostridium thermocellum glucoamylase of SEQ ID NO: 110. In one embodiment, the glucoamylase is derived from the Arxula adeninivorans glucoamylase of SEQ ID NO: 111. In one embodiment, the glucoamylase is derived from the Hormoconis resinae glucoamylase of SEQ ID NO: 112. In one embodiment, the glucoamylase is derived from the Aureobasidium pullulans glucoamylase of SEQ ID NO: 113. In one embodiment, the glucoamylase is derived from the Rhizopus microsporus glucoamylase of SEQ ID NO: 248. In one embodiment, the glucoamylase is derived from the Rhizopus delemar glucoamylase of SEQ ID NO: 249. In one embodiment, the glucoamylase is derived from the Punctularia strigosozonata glucoamylase of SEQ ID NO: 244. In one embodiment, the glucoamylase is derived from the Fibroporia radiculosa glucoamylase of SEQ ID NO: 245. In one embodiment, the glucoamylase is derived from the Wolfiporia cocos glucoamylase of SEQ ID NO: 246.

[0224] In one embodiment, the glucoamylase is a Trichoderma reesei glucoamylase, such as the Trichoderma reesei glucoamylase of SEQ ID NO: 230.

[0225] In one embodiment, the glucoamylase has a Relative Activity heat stability at 85° C. of at least 20%, at least 30%, or at least 35% determined as described in Example 4 of WO2018/098381 (heat stability).

[0226] In one embodiment, the glucoamylase has a relative activity pH optimum at pH 5.0 of at least 90%, e.g., at least 95%, at least 97%, or 100% determined as described in Example 4 of WO2018/098381 (pH optimum).

[0227] In one embodiment, the glucoamylase has a pH stability at pH 5.0 of at least 80%, at least 85%, at least 90% determined as described in Example 4 of WO2018/098381 (pH stability).

[0228] In one embodiment, the glucoamylase used in liquefaction, such as a Penicillium oxalicum glucoamylase variant, has a thermostability determined as DSC Td at pH 4.0 as described in Example 15 of WO2018/098381 of at least 70° C., preferably at least 75° C., such as at least 80° C., such as at least 81° C., such as at least 82° C., such as at least 83° C., such as at least 84° C., such as at least 85° C., such as at least 86° C., such as at least 87%, such as at least 88° C., such as at least 89° C., such as at least 90° C. In one embodiment, the glucoamylase, such as a Penicillium oxalicum glucoamylase variant, has a thermostability determined as DSC Td at pH 4.0 as described in Example 15 of WO2018/098381 in the range between 70° C. and 95° C., such as between 80° C. and 90° C.

[0229] In one embodiment, the glucoamylase, such as a Penicillium oxalicum glucoamylase variant, used in liquefaction has a thermostability determined as DSC Td at pH 4.8 as described in Example 15 of WO2018/098381 of at least 70° C., preferably at least 75° C., such as at least 80° C., such as at least 81° C., such as at least 82° C., such as at least 83° C., such as at least 84° C., such as at least 85° C., such as at least 86° C., such as at least 87%, such as at least 88° C., such as at least 89° C., such as at least 90° C., such as at least 91° C. In one embodiment, the glucoamylase, such as a Penicillium oxalicum glucoamylase variant, has a thermostability determined as DSC Td at pH 4.8 as described in Example 15 of WO2018/098381 in the range between 70° C. and 95° C., such as between 80° C. and 90° C.

[0230] In one embodiment, the glucoamylase, such as a Penicillium oxalicum glucoamylase variant, used in liquefaction has a residual activity determined as described in Example 16 of WO2018/098381, of at least 100% such as at least 105%, such as at least 110%, such as at least 115%, such as at least 120%, such as at least 125%. In one embodiment, the glucoamylase, such as a Penicillium oxalicum glucoamylase variant, has a thermostability determined as residual activity as described in Example 16 of WO2018/098381, in the range between 100% and 130%.

[0231] In one embodiment, the glucoamylase, e.g., of fungal origin such as a filamentous fungi, from a strain of the genus Penicillium, e.g., a strain of Penicillium oxalicum, in particular the Penicillium oxalicum glucoamylase disclosed as SEQ ID NO: 2 in WO 2011/127802 (which is hereby incorporated by reference).

[0232] In one embodiment, the glucoamylase has a mature polypeptide sequence of at least 80%, e.g., at least 85%, at least 90%, at least 91%, at least 92%, at least 93%, at least 94%, at least 95%, at least 96%, at least 97%, at least 98%, at least 99% or 100% identity to the mature polypeptide shown in SEQ ID NO: 2 in WO 2011/127802.

[0233] In one embodiment, the glucoamylase is a variant of the Penicillium oxalicum glucoamylase disclosed as SEQ ID NO: 2 in WO 2011/127802, having a K79V substitution. The K79V glucoamylase variant has reduced sensitivity to protease degradation relative to the parent as disclosed in WO 2013/036526 (which is hereby incorporated by reference).

[0234] In one embodiment, the glucoamylase is derived from Penicillium oxalicum.

[0235] In one embodiment, the glucoamylase is a variant of the Penicillium oxalicum glucoamylase disclosed as SEQ ID NO: 2 in WO 2011/127802. In one embodiment, the Penicillium oxalicum glucoamylase is the one disclosed as SEQ ID NO: 2 in WO 2011/127802 having Val (V) in position 79.

[0236] Contemplated Penicillium oxalicum glucoamylase variants are disclosed in WO 2013/053801 which is hereby incorporated by reference.

[0237] In one embodiment, these variants have reduced sensitivity to protease degradation.

[0238] In one embodiment, these variants have improved thermostability compared to the parent.

[0239] In one embodiment, the glucoamylase has a K79V substitution (using SEQ ID NO: 2 of WO 2011/127802 for numbering), corresponding to the PE001 variant, and further comprises one of the following alterations or combinations of alterations

[0240] T65A; Q327F; E501V; Y504T; Y504*; T65A+Q327F; T65A+E501V; T65A+Y504T; T65A+Y504*; Q327F+E501V; Q327F+Y504T; Q327F+Y504*; E501V+Y504T; E501V+Y504*; T65A+Q327F+E501V; T65A+Q327F+Y504T; T65A+E501V+Y504T; Q327F+E501V+Y504T; T65A+Q327F+Y504*; T65A+E501V+Y504*; Q327F+E501V+Y504*; T65A+Q327F+E501V+Y504T; T65A+Q327F+E501V+Y504*; E501V+Y504T; T65A+K161S; T65A+Q405T; T65A+Q327W; T65A+Q327F; T65A+Q327Y; P11F+T65A+Q327F; R1K+D3W+K5Q+G7V+N8S+T1OK+P11S+T65A+Q327F; P2N+P4S+P11F+T65A+Q327F; P11F+D26C+K33C+T65A+Q327F; P2N+P4S+P11F+T65A+Q327W+E501V+Y504T; RlE+D3N+P4G+G6R+G7A+N8A+T10D+P11D+T65A+Q327F; P11F+T65A+Q327W; P2N+P4S+P11F+T65A+Q327F+E501V+Y504T; P11F+T65A+Q327W+E501V+Y504T; T65A+Q327F+E501V+Y504T; T65A+S105P+Q327W; T65A+S105P+Q327F; T65A+Q327W+S364P; T65A+Q327F+S364P; T65A+S103N+Q327F; P2N+P4S+P11F+K34Y+T65A+Q327F; P2N+P4S+P11F+T65A+Q327F+D445N+V4475; P2N+P4S+P11F+T65A+1172V+Q327F; P2N+P4S+P11F+T65A+Q327F+N502*; P2N+P4S+P11F+T65A+Q327F+N502T+P563S+K571E; P2N+P4S+P11F+R31S+K33V+T65A+Q327F+N564D+K571S; P2N+P4S+P11F+T65A+Q327F+S377T; P2N+P4S+P11F+T65A+V325T+Q327W; P2N+P4S+P11F+T65A+Q327F+D445N+V4475+E501V+Y504T; P2N+P4S+P11F+T65A+I172V+Q327F+E501V+Y504T; P2N+P4S+P11F+T65A+Q327F+S377T+E501V+Y504T; P2N+P4S+P11F+D26N+K34Y+T65A+Q327F; P2N+P4S+P11F+T65A+Q327F+1375A+E501V+Y504T; P2N+P4S+P11F+T65A+K218A+K221D+Q327F+E501V+Y504T; P2N+P4S+P11F+T65A+S103N+Q327F+E501V+Y504T; P2N+P4S+T10D+T65A+Q327F+E501V+Y504T; P2N+P4S+F12Y+T65A+Q327F+E501V+Y504T; K5A+P11F+T65A+Q327F+E501V+Y504T; P2N+P4S+T10E+E18N+T65A+Q327F+E501V+Y504T; P2N+T1OE+E18N+T65A+Q327F+E501V+Y504T; P2N+P4S+P11F+T65A+Q327F+E501V+Y504T+T568N; P2N+P4S+P11F+T65A+Q327F+E501V+Y504T+K524T+G526A; P2N+P4S+P11F+K34Y+T65A+Q327F+D445N+V447S+E501V+Y504T; P2N+P4S+P11F+R31S+K33V+T65A+Q327F+D445N+V447S+E501V+Y504T; P2N+P4S+P11F+D26N+K34Y+T65A+Q327F+E501V+Y504T; P2N+P4S+P11F+T65A+F80*+Q327F+E501V+Y504T; P2N+P4S+P11F+T65A+K112S+Q327F+E501V+Y504T; P2N+P4S+P11F+T65A+Q327F+E501V+Y504T+T516P+K524T+G526A; P2N+P4S+P11F+T65A+Q327F+E501V+N502T+Y504*; P2N+P4S+P11F+T65A+Q327F+E501V+Y504T; P2N+P4S+P11F+T65A+S103N+Q327F+E501V+Y504T; K5A+P11F+T65A+Q327F+E501V+Y504T; P2N+P4S+P11F+T65A+Q327F+E501V+Y504T+T516P+K524T+G526A; P2N+P4S+P11F+T65A+V79A+Q327F+E501V+Y504T; P2N+P4S+P11F+T65A+V79G+Q327F+E501V+Y504T; P2N+P4S+P11F+T65A+V791+Q327F+E501V+Y504T; P2N+P4S+P11F+T65A+V79L+Q327F+E501V+Y504T; P2N+P4S+P11F+T65A+V79S+Q327F+E501V+Y504T; P2N+P4S+P11F+T65A+L72V+Q327F+E501V+Y504T; S255N+Q327F+E501V+Y504T; P2N+P4S+P11F+T65A+E74N+V79K+Q327F+E501V+Y504T; P2N+P4S+P11F+T65A+G220N+Q327F+E501V+Y504T; P2N+P4S+P11F+T65A+Y245N+Q327F+E501V+Y504T; P2N+P4S+P11F+T65A+Q253N+Q327F+E501V+Y504T; P2N+P4S+P11F+T65A+D279N+Q327F+E501V+Y504T; P2N+P4S+P11F+T65A+Q327F+S359N+E501V+Y504T; P2N+P4S+P11F+T65A+Q327F+D370N+E501V+Y504T; P2N+P4S+P11F+T65A+Q327F+V460S+E501V+Y504T; P2N+P4S+P11F+T65A+Q327F+V460T+P468T+E501V+Y504T; P2N+P4S+P11F+T65A+Q327F+T463N+E501V+Y504T; P2N+P4S+P11F+T65A+Q327F+S465N+E501V+Y504T; and P2N+P4S+P11F+T65A+Q327F+T477N+E501V+Y504T.

[0241] In one embodiment, the Penicillium oxalicum glucoamylase variant has a K79V substitution (using SEQ ID NO: 2 of WO 2011/127802 for numbering), corresponding to the PE001 variant, and further comprises one of the following substitutions or combinations of substitutions:

[0242] P11F+T65A+Q327F;

[0243] P2N+P4S+P11F+T65A+Q327F;

[0244] P11F+D26C+K33C+T65A+Q327F;

[0245] P2N+P4S+P11F+T65A+Q327W+E501V+Y504T;

[0246] P2N+P4S+P11F+T65A+Q327F+E501V+Y504T; and

[0247] P11F+T65A+Q327W+E501V+Y504T.

[0248] Additional glucoamylases contemplated for use with the present invention can be found in WO2011/153516 (the content of which is incorporated herein).

[0249] Additional polynucleotides encoding suitable glucoamylases may be obtained from microorganisms of any genus, including those readily available within the UniProtKB database (www.uniprot.org).

[0250] The glucoamylase coding sequences can also be used to design nucleic acid probes to identify and clone DNA encoding glucoamylases from strains of different genera or species, as described supra.

[0251] The polynucleotides encoding glucoamylases may also be identified and obtained from other sources including microorganisms isolated from nature (e.g., soil, composts, water, etc.) or DNA samples obtained directly from natural materials (e.g., soil, composts, water, etc,) as described supra.

[0252] Techniques used to isolate or clone polynucleotides encoding glucoamylases are described supra.

[0253] In one embodiment, the glucoamylase has a mature polypeptide sequence that comprises or consists of the amino acid sequence of any one of the glucoamylases described or referenced herein (e.g., any one of SEQ ID NOs: 8, 102-113, 229, 230 and 244-250). In another embodiment, the glucoamylase has a mature polypeptide sequence that is a fragment of the any one of the glucoamylases described or referenced herein (e.g., any one of SEQ ID NOs: 8, 102-113, 229, 230 and 244-250). In one embodiment, the number of amino acid residues in the fragment is at least 75%, e.g., at least 80%, 85%, 90%, or 95% of the number of amino acid residues in referenced full length glucoamylase (e.g. any one of SEQ ID NOs: 8, 102-113, 229, 230 and 244-250). In other embodiments, the glucoamylase may comprise the catalytic domain of any glucoamylase described or referenced herein (e.g., the catalytic domain of any one of SEQ ID NOs: 8, 102-113, 229, 230 and 244-250).

[0254] The glucoamylase may be a variant of any one of the glucoamylases described supra (e.g., any one of SEQ ID NOs: 8, 102-113, 229, 230 and 244-250). In one embodiment, the glucoamylase has a mature polypeptide sequence of at least 60%, e.g., at least 65%, 70%, 75%, 80%, 85%, 90%, 95%, 97%, 98%, 99%, or 100% sequence identity to any one of the glucoamylases described supra (e.g., any one of SEQ ID NOs: 8, 102-113, 229, 230 and 244-250).

[0255] Examples of suitable amino acid changes, such as conservative substitutions that do not significantly affect the folding and/or activity of the glucoamylase, are described herein.

[0256] In one embodiment, the glucoamylase has a mature polypeptide sequence that differs by no more than ten amino acids, e.g., by no more than five amino acids, by no more than four amino acids, by no more than three amino acids, by no more than two amino acids, or by one amino acid from the amino acid sequence of any one of the glucoamylases described supra (e.g., any one of SEQ ID NOs: 8, 102-113, 229, 230 and 244-250). In one embodiment, the glucoamylase has an amino acid substitution, deletion, and/or insertion of one or more (e.g., two, several) of amino acid sequence of any one of the glucoamylases described supra (e.g., any one of SEQ ID NOs: 8, 102-113, 229, 230 and 244-250). In some embodiments, the total number of amino acid substitutions, deletions and/or insertions is not more than 10, e.g., not more than 9, 8, 7, 6, 5, 4, 3, 2, or 1.

[0257] In some embodiments, the glucoamylase has at least 20%, e.g., at least 40%, at least 50%, at least 60%, at least 70%, at least 80%, at least 90%, at least 95%, at least 96%, at least 97%, at least 98%, at least 99%, or 100% of the glucoamylase activity of any glucoamylase described or referenced herein (e.g., any one of SEQ ID NOs: 8, 102-113, 229, 230 and 244-250) under the same conditions.

[0258] In one embodiment, the glucoamylase coding sequence hybridizes under at least low stringency conditions, e.g., medium stringency conditions, medium-high stringency conditions, high stringency conditions, or very high stringency conditions with the full-length complementary strand of the coding sequence from any glucoamylase described or referenced herein (e.g., any one of SEQ ID NOs: 8, 102-113, 229, 230 and 244-250). In one embodiment, the glucoamylase coding sequence has at least 65%, e.g., at least 70%, at least 75%, at least 80%, at least 85%, at least 85%, at least 90%, at least 91%, at least 92%, at least 93%, at least 94%, at least 95%, at least 96%, at least 97%, at least 98%, at least 99%, or 100% sequence identity with the coding sequence from any glucoamylase described or referenced herein (e.g., any one of SEQ ID NOs: 8, 102-113, 229, 230 and 244-250).

[0259] In one embodiment, the glucoamylase comprises the coding sequence of any glucoamylase described or referenced herein (any one of SEQ ID NOs: 8, 102-113, 229, 230 and 244-250). In one embodiment, the glucoamylase comprises a coding sequence that is a subsequence of the coding sequence from any glucoamylase described or referenced herein, wherein the subsequence encodes a polypeptide having glucoamylase activity. In one embodiment, the number of nucleotides residues in the subsequence is at least 75%, e.g., at least 80%, 85%, 90%, or 95% of the number of the referenced coding sequence.

[0260] The referenced glucoamylase coding sequence of any related aspect or embodiment described herein can be the native coding sequence or a degenerate sequence, such as a codon-optimized coding sequence designed for use in a particular host cell (e.g., optimized for expression in Saccharomyces cerevisiae).

[0261] The glucoamylase can also include fused polypeptides or cleavable fusion polypeptides, as described supra.

### Alpha-Amylases

[0262] The host cells and fermenting organisms may express a heterologous alpha-amylase. The alpha-amylase may be any alpha-amylase that is suitable for the host cells and/or the methods described herein, such as a naturally occurring alpha-amylase (e.g., a native alpha-amylase from another species or an endogenous alpha-amylase expressed from a modified expression vector) or a variant thereof that retains alpha-amylase activity. Any alpha-amylase contemplated for expression by a host cell or fermenting organism described below is also contemplated for embodiments of the invention involving exogenous addition of an alpha-amylase.

[0263] In some embodiments, the host cell or fermenting organism comprises a heterologous polynucleotide encoding an alpha-amylase, for example, as described in WO2017/087330 or PCT/US2019/042870, the content of which is hereby incorporated by reference. Any alpha-amylase described or referenced herein is contemplated for expression in the host cell or fermenting organism.

[0264] In some embodiments, the host cell or fermenting organism comprising a heterologous polynucleotide encoding an alpha-amylase has an increased level of alpha-amylase activity compared to the host cells without the heterologous polynucleotide encoding the alpha-amylase, when cultivated under the same conditions. In some embodiments, the host cell or fermenting organism has an increased level of alpha-amylase activity of at least 5%, e.g., at least 10%, at least 15%, at least 20%, at least 25%, at least 50%, at least 100%, at least 150%, at least 200%, at least 300%, or at 500% compared to the host cell or fermenting organism without the heterologous polynucleotide encoding the alpha-amylase, when cultivated under the same conditions (e.g., as described in Example 2).

[0265] Exemplary alpha-amylases that can be used with the host cells and/or the methods described herein include bacterial, yeast, or filamentous fungal alpha-amylases, e.g., derived from any of the microorganisms described or referenced herein.

[0266] The term “bacterial alpha-amylase” means any bacterial alpha-amylase classified under EC 3.2.1.1. A bacterial alpha-amylase used herein may, e.g., be derived from a strain of the genus Bacillus, which is sometimes also referred to as the genus Geobacillus. In one embodiment, the Bacillus alpha-amylase is derived from a strain of Bacillus amyloliquefaciens, Bacillus licheniformis, Bacillus stearothermophilus, or Bacillus subtilis, but may also be derived from other Bacillus sp.

[0267] Specific examples of bacterial alpha-amylases include the Bacillus stearothermophilus alpha-amylase (BSG) of SEQ ID NO: 3 in WO 99/19467, the Bacillus amyloliquefaciens alpha-amylase (BAN) of SEQ ID NO: 5 in WO 99/19467, and the Bacillus licheniformis alpha-amylase (BLA) of SEQ ID NO: 4 in WO 99/19467 (all sequences are hereby incorporated by reference). In one embodiment, the alpha-amylase may be an enzyme having a mature polypeptide sequence with a degree of identity of at least 60%, e.g., at least 70%, at least 80%, at least 90%, at least 95%, at least 96%, at least 97%, at least 98% or at least 99% to any of the sequences shown in SEQ ID NOs: 3, 4 or 5, in WO 99/19467.

[0268] In one embodiment, the alpha-amylase is derived from Bacillus stearothermophilus. The Bacillus stearothermophilus alpha-amylase may be a mature wild-type or a mature variant thereof. The mature Bacillus stearothermophilus alpha-amylases may naturally be truncated during recombinant production. For instance, the Bacillus stearothermophilus alpha-amylase may be a truncated at the C-terminal, so that it is from 480-495 amino acids long, such as about 491 amino acids long, e.g., so that it lacks a functional starch binding domain (compared to SEQ ID NO: 3 in WO 99/19467).

[0269] The Bacillus alpha-amylase may also be a variant and/or hybrid. Examples of such a variant can be found in any of WO 96/23873, WO 96/23874, WO 97/41213, WO 99/19467, WO 00/60059, and WO 02/10355 (each hereby incorporated by reference). Specific alpha-amylase variants are disclosed in U.S. Pat. Nos. 6,093,562, 6,187,576, 6,297,038, and 7,713,723 (hereby incorporated by reference) and include Bacillus stearothermophilus alpha-amylase (often referred to as BSG alpha-amylase) variants having a deletion of one or two amino acids at positions R179, G180, I181 and/or G182, preferably a double deletion disclosed in WO 96/23873—see, e.g., page 20, lines 1-10 (hereby incorporated by reference), such as corresponding to deletion of positions I181 and G182 compared to the amino acid sequence of Bacillus stearothermophilus alpha-amylase set forth in SEQ ID NO: 3 disclosed in WO 99/19467 or the deletion of amino acids R179 and G180 using SEQ ID NO: 3 in WO 99/19467 for numbering (which reference is hereby incorporated by reference). In some embodiments, the Bacillus alpha-amylases, such as Bacillus stearothermophilus alpha-amylases, have a double deletion corresponding to a deletion of positions 181 and 182 and further optionally comprise a N193F substitution (also denoted I181*+G182*+N193F) compared to the wild-type BSG alpha-amylase amino acid sequence set forth in SEQ ID NO: 3 disclosed in WO 99/19467. The bacterial alpha-amylase may also have a substitution in a position corresponding to S239 in the Bacillus licheniformis alpha-amylase shown in SEQ ID NO: 4 in WO 99/19467, or a S242 and/or E188P variant of the Bacillus stearothermophilus alpha-amylase of SEQ ID NO: 3 in WO 99/19467.

[0270] In one embodiment, the variant is a S242A, E or Q variant, e.g., a S242Q variant, of the Bacillus stearothermophilus alpha-amylase.

[0271] In one embodiment, the variant is a position E188 variant, e.g., E188P variant of the Bacillus stearothermophilus alpha-amylase.

[0272] The bacterial alpha-amylase may, in one embodiment, be a truncated Bacillus alpha-amylase. In one embodiment, the truncation is so that, e.g., the Bacillus stearothermophilus alpha-amylase shown in SEQ ID NO: 3 in WO 99/19467, is about 491 amino acids long, such as from 480 to 495 amino acids long, or so it lacks a functional starch bind domain.

[0273] The bacterial alpha-amylase may also be a hybrid bacterial alpha-amylase, e.g., an alpha-amylase comprising 445 C-terminal amino acid residues of the Bacillus licheniformis alpha-amylase (shown in SEQ ID NO: 4 of WO 99/19467) and the 37 N-terminal amino acid residues of the alpha-amylase derived from Bacillus amyloliquefaciens (shown in SEQ ID NO: 5 of WO 99/19467). In one embodiment, this hybrid has one or more, especially all, of the following substitutions: G48A+T49I+G107A+H156Y+A181T+N190F+I201F+A209V+Q264S (using the Bacillus licheniformis numbering in SEQ ID NO: 4 of WO 99/19467). In some embodiments, the variants have one or more of the following mutations (or corresponding mutations in other Bacillus alpha-amylases): H154Y, A181T, N190F, A209V and Q264S and/or the deletion of two residues between positions 176 and 179, e.g., deletion of E178 and G179 (using SEQ ID NO: 5 of WO 99/19467 for position numbering).

[0274] In one embodiment, the bacterial alpha-amylase is the mature part of the chimeric alpha-amylase disclosed in Richardson et al. (2002), The Journal of Biological Chemistry, Vol. 277, No 29, Issue 19 July, pp. 267501-26507, referred to as BD5088 or a variant thereof. This alpha-amylase is the same as the one shown in SEQ ID NO: 2 in WO 2007/134207. The mature enzyme sequence starts after the initial “Met” amino acid in position 1.

[0275] The alpha-amylase may be a thermostable alpha-amylase, such as a thermostable bacterial alpha-amylase, e.g., from Bacillus stearothermophilus. In one embodiment, the alpha-amylase used in a process described herein has a T½ (min) at pH 4.5, 85° C., 0.12 mM CaCl₂ of at least 10 determined as described in Example 1 of WO2018/098381.

[0276] In one embodiment, the thermostable alpha-amylase has a T½ (min) at pH 4.5, 85° C., 0.12 mM CaCl₂, of at least 15. In one embodiment, the thermostable alpha-amylase has a T½ (min) at pH 4.5, 85° C., 0.12 mM CaCl₂, of as at least 20. In one embodiment, the thermostable alpha-amylase has a T½ (min) at pH 4.5, 85° C., 0.12 mM CaCl₂, of as at least 25. In one embodiment, the thermostable alpha-amylase has a T½ (min) at pH 4.5, 85° C., 0.12 mM CaCl₂, of as at least 30. In one embodiment, the thermostable alpha-amylase has a T½ (min) at pH 4.5, 85° C., 0.12 mM CaCl₂, of as at least 40.

[0277] In one embodiment, the thermostable alpha-amylase has a T½ (min) at pH 4.5, 85° C., 0.12 mM CaCl₂, of at least 50. In one embodiment, the thermostable alpha-amylase has a T½ (min) at pH 4.5, 85° C., 0.12 mM CaCl₂, of at least 60. In one embodiment, the thermostable alpha-amylase has a T½ (min) at pH 4.5, 85° C., 0.12 mM CaCl₂, between 10-70. In one embodiment, the thermostable alpha-amylase has a T½ (min) at pH 4.5, 85° C., 0.12 mM CaCl₂, between 15-70. In one embodiment, the thermostable alpha-amylase has a T½ (min) at pH 4.5, 85° C., 0.12 mM CaCl₂, between 20-70. In one embodiment, the thermostable alpha-amylase has a T½ (min) at pH 4.5, 85° C., 0.12 mM CaCl₂, between 25-70. In one embodiment, the thermostable alpha-amylase has a T½ (min) at pH 4.5, 85° C., 0.12 mM CaCl₂, between 30-70. In one embodiment, the thermostable alpha-amylase has a T½ (min) at pH 4.5, 85° C., 0.12 mM CaCl₂, between 40-70. In one embodiment, the thermostable alpha-amylase has a T½ (min) at pH 4.5, 85° C., 0.12 mM CaCl₂, between 50-70. In one embodiment, the thermostable alpha-amylase has a T½ (min) at pH 4.5, 85° C., 0.12 mM CaCl₂, between 60-70.

[0278] In one embodiment, the alpha-amylase is a bacterial alpha-amylase, e.g., derived from the genus Bacillus, such as a strain of Bacillus stearothermophilus, e.g., the Bacillus stearothermophilus as disclosed in WO 99/019467 as SEQ ID NO: 3 with one or two amino acids deleted at positions R179, G180, I181 and/or G182, in particular with R179 and G180 deleted, or with I181 and G182 deleted, with mutations in below list of mutations.

[0279] In some embodiment, the Bacillus stearothermophilus alpha-amylases have double deletion I181+G182, and optional substitution N193F, further comprising one of the following substitutions or combinations of substitutions:

[0280] V59A+Q89R+G 112 D+E129V+K177L+R179E+K220P+N224L+Q254S;

[0281] V59A+Q89R+E129V+K177L+R179E+H208Y+K220P+N224L+Q254S;

[0282] V59A+Q89R+E129V+K177L+R179E+K220P+N224L+Q254S+D269E+D281N;

[0283] V59A+Q89R+E129V+K177L+R179E+K220P+N224L+Q254S+I270L;

[0284] V59A+Q89R+E129V+K177L+R179E+K220P+N224L+Q254S+H274K;

[0285] V59A+Q89R+E129V+K177L+R179E+K220P+N224L+Q254S+Y276F;

[0286] V59A+E129V+R157Y+K177L+R179E+K220P+N224L+S242Q+Q254S;

[0287] V59A+E129V+K177L+R179E+H208Y+K220P+N224L+S242Q+Q254S;

[0288] V59A+E129V+K177L+R179E+K220P+N224L+S242Q+Q254S;

[0289] V59A+E129V+K177L+R179E+K220P+N224L+S242Q+Q254S+H274K;

[0290] V59A+E129V+K177L+R179E+K220P+N224L+S242Q+Q254S+Y276F;

[0291] V59A+E129V+K177L+R179E+K220P+N224L+S242Q+Q254S+D281N;

[0292] V59A+E129V+K177L+R179E+K220P+N224L+S242Q+Q254S+M284T;

[0293] V59A+E129V+K177L+R179E+K220P+N224L+S242Q+Q254S+G416V;

[0294] V59A+E129V+K177L+R179E+K220P+N224L+Q254S;

[0295] V59A+E129V+K177L+R179E+K220P+N224L+Q254S+M284T;

[0296] A91L+M96I+E129V+K177L+R179E+K220P+N224L+S242Q+Q254S;

[0297] E129V+K177L+R179E;

[0298] E129V+K177L+R179E+K220P+N224L+S242Q+Q254S;

[0299] E129V+K177L+R179E+K220P+N224L+S242Q+Q254S+Y276F+L427M;

[0300] E129V+K177L+R179E+K220P+N224L+S242Q+Q254S+M284T;

[0301] E129V+K177L+R179E+K220P+N224L+S242Q+Q254S+N376*+I377*;

[0302] E129V+K177L+R179E+K220P+N224L+Q254S;

[0303] E129V+K177L+R179E+K220P+N224L+Q254S+M284T;

[0304] E129V+K177L+R179E+S242Q;

[0305] E129V+K177L+R179V+K220P+N224L+S242Q+Q254S;

[0306] K220P+N224L+S242Q+Q254S;

[0307] M284V;

[0308] V59A+Q89R+E129V+K177L+R179E+Q254S+M284V; and

[0309] V59A+E129V+K177L+R179E+Q254S+M284V;

[0310] In one embodiment, the alpha-amylase is selected from the group of Bacillus stearothermophilus alpha-amylase variants with double deletion I181*+G182*, and optionally substitution N193F, and further one of the following substitutions or combinations of substitutions:

[0311] E129V+K177L+R179E;

[0312] V59A+Q89R+E129V+K177L+R179E+H208Y+K220P+N224L+Q254S;

[0313] V59A+Q89R+E129V+K177L+R179E+Q254S+M284V;

[0314] V59A+E129V+K177L+R179E+Q254S+M284V; and

[0315] E129V+K177L+R179E+K220P+N224L+S242Q+Q254S (using SEQ ID NO: 1 herein for numbering).

[0316] It should be understood that when referring to Bacillus stearothermophilus alpha-amylase and variants thereof they are normally produced in truncated form. In particular, the truncation may be so that the Bacillus stearothermophilus alpha-amylase shown in SEQ ID NO: 3 in WO 99/19467, or variants thereof, are truncated in the C-terminal and are typically from 480-495 amino acids long, such as about 491 amino acids long, e.g., so that it lacks a functional starch binding domain.

[0317] In one embodiment, the alpha-amylase variant may be an enzyme having a mature polypeptide sequence with a degree of identity of at least 60%, e.g., at least 70%, at least 80%, at least 90%, at least 95%, at least 91%, at least 92%, at least 93%, at least 94%, at least 95%, at least 96%, at least 97%, at least 98% or at least 99%, but less than 100% to the sequence shown in SEQ ID NO: 3 in WO 99/19467.

[0318] In one embodiment, the bacterial alpha-amylase, e.g., Bacillus alpha-amylase, such as especially Bacillus stearothermophilus alpha-amylase, or variant thereof, is dosed to liquefaction in a concentration between 0.01-10 KNU-A/g DS, e.g., between 0.02 and 5 KNU-A/g DS, such as 0.03 and 3 KNU-A, preferably 0.04 and 2 KNU-A/g DS, such as especially 0.01 and 2 KNU-A/g DS. In one embodiment, the bacterial alpha-amylase, e.g., Bacillus alpha-amylase, such as especially Bacillus stearothermophilus alpha-amylases, or variant thereof, is dosed to liquefaction in a concentration of between 0.0001-1 mg EP (Enzyme Protein)/g DS, e.g., 0.0005-0.5 mg EP/g DS, such as 0.001-0.1 mg EP/g DS.

[0319] In one embodiment, the bacterial alpha-amylase is derived from the Bacillus subtilis alpha-amylase of SEQ ID NO: 76, the Bacillus subtilis alpha-amylase of SEQ ID NO: 82, the Bacillus subtilis alpha-amylase of SEQ ID NO: 83, the Bacillus subtilis alpha-amylase of SEQ ID NO: 84, or the Bacillus licheniformis alpha-amylase of SEQ ID NO: 85, the Clostridium phytofermentans alpha-amylase of SEQ ID NO: 89, the Clostridium phytofermentans alpha-amylase of SEQ ID NO: 90, the Clostridium phytofermentans alpha-amylase of SEQ ID NO: 91, the Clostridium phytofermentans alpha-amylase of SEQ ID NO: 92, the Clostridium phytofermentans alpha-amylase of SEQ ID NO: 93, the Clostridium phytofermentans alpha-amylase of SEQ ID NO: 94, the Clostridium thermocellum alpha-amylase of SEQ ID NO: 95, the Thermobifida fusca alpha-amylase of SEQ ID NO: 96, the Thermobifida fusca alpha-amylase of SEQ ID NO: 97, the Anaerocellum thermophilum of SEQ ID NO: 98, the Anaerocellum thermophilum of SEQ ID NO: 99, the Anaerocellum thermophilum of SEQ ID NO: 100, the Streptomyces avermitilis of SEQ ID NO: 101, or the Streptomyces avermitilis of SEQ ID NO: 88.

[0320] In one embodiment, the alpha-amylase is derived from Bacillus amyloliquefaciens, such as the Bacillus amyloliquefaciens alpha-amylase of SEQ ID NO: 231 (e.g., as described in WO2018/002360, or variants thereof as described in WO2017/037614).

[0321] In one embodiment, the alpha-amylase is derived from a yeast alpha-amylase, such as the Saccharomycopsis fibuligera alpha-amylase of SEQ ID NO: 77, the Debaryomyces occidentalis alpha-amylase of SEQ ID NO: 78, the Debaryomyces occidentalis alpha-amylase of SEQ ID NO: 79, the Lipomyces kononenkoae alpha-amylase of SEQ ID NO: 80, the Lipomyces kononenkoae alpha-amylase of SEQ ID NO: 81.

[0322] In one embodiment, the alpha-amylase is derived from a filamentous fungal alpha-amylase, such as the Aspergillus niger alpha-amylase of SEQ ID NO: 86, or the Aspergillus niger alpha-amylase of SEQ ID NO: 87.

[0323] Additional alpha-amylases that may be expressed with the host cells and fermenting organisms and used with the methods described herein are described in the examples, and include, but are not limited to alpha-amylases shown in Table 3 (or derivatives thereof).

TABLE 3

| Donor Organism | SEQ ID NO: |
|---|---|
| (catalytic domain) | (mature polypeptide) |
| Rhizomucor pusillus | 121 |
| Bacillus licheniformis | 122 |
| Aspergillus niger | 123 |
| Aspergillus tamarii | 124 |
| Acidomyces richmondensis | 125 |
| Aspergillus bombycis | 126 |
| Alternaria sp | 127 |
| Rhizopus microsporus | 128 |
| Syncephalastrum racemosum | 129 |
| Rhizomucor pusillus | 130 |
| Dichotomocladium hesseltinei | 131 |
| Lichtheimia ramosa | 132 |
| Penicillium aethiopicum | 133 |
| Subulispora sp | 134 |
| Trichoderma paraviridescens | 135 |
| Byssoascus striatosporus | 136 |
| Aspergillus brasiliensis | 137 |
| Penicillium subspinulosum | 138 |
| Penicillium antarcticum | 139 |
| Penicillium coprophilum | 140 |
| Penicillium olsonii | 141 |
| Penicillium vasconiae | 142 |
| Penicillium sp | 143 |
| Heterocephalum aurantiacum | 144 |
| Neosartorya massa | 145 |
| Penicillium janthinellum | 146 |
| Aspergillus brasiliensis | 147 |
| Aspergillus westerdijkiae | 148 |
| Hamigera avellanea | 149 |
| Hamigera avellanea | 150 |
| Meripilus giganteus | 151 |
| Cerrena unicolor | 152 |
| Physalacria cryptomeriae | 153 |
| Lenzites betulinus | 154 |
| Trametes ljubarskyi | 155 |
| Bacillus subtilis | 156 |
| Bacillus subtilis subsp. subtilis | 157 |
| Schwanniomyces occidentalis | 158 |
| Rhizomucor pusillus | 159 |
| Aspergillus niger | 160 |
| Bacillus stearothermophilus | 161 |
| Bacillus halmapalus | 162 |
| Aspergillus oryzae | 163 |
| Bacillus amyloliquefaciens | 164 |
| Rhizomucor pusillus | 165 |
| Kionochaeta ivoriensis | 166 |
| Aspergillus niger | 167 |
| Aspergillus oryzae | 168 |
| Penicillium canescens | 169 |
| Acidomyces acidothermus | 170 |
| Kinochaeta ivoriensis | 171 |
| Aspergillus terreus | 172 |
| Thamnidium elegans | 173 |
| Meripilus giganteus | 174 |
| Bacillus amyloliquefaciens | 231 |
| Thermococcus gammatolerans | 251 |
| Thermococcus thioreducens | 252 |
| Thermococcus eurythermalis | 253 |
| Thermococcus hydrothermalis | 254 |
| Pyrococcus furiosus | 255 |
| Bacillus amyloliquefaciens | 256 |

[0324] Additional alpha-amylases contemplated for use with the present invention can be found in WO2011/153516, WO2017/087330 and PCT/US2019/042870 (the content of which is incorporated herein).

[0325] Additional polynucleotides encoding suitable alpha-amylases may be obtained from microorganisms of any genus, including those readily available within the UniProtKB database (www.uniprot.org).

[0326] The alpha-amylase coding sequences can also be used to design nucleic acid probes to identify and clone DNA encoding trehalases from strains of different genera or species, as described supra.

[0327] The polynucleotides encoding alpha-amylases may also be identified and obtained from other sources including microorganisms isolated from nature (e.g., soil, composts, water, etc.) or DNA samples obtained directly from natural materials (e.g., soil, composts, water, etc.) as described supra.

[0328] Techniques used to isolate or clone polynucleotides encoding alpha-amylases are described supra.

[0329] In one embodiment, the alpha-amylase has a mature polypeptide sequence that comprises or consists of the amino acid sequence of any one of the alpha-amylases described or referenced herein (e.g., any one of SEQ ID NOs: 76-101, 121-174, 231 and 251-256). In another embodiment, the alpha-amylase has a mature polypeptide sequence that is a fragment of the any one of the alpha-amylases described or referenced herein (e.g., any one of SEQ ID NOs: 76-101, 121-174, 231 and 251-256). In one embodiment, the number of amino acid residues in the fragment is at least 75%, e.g., at least 80%, 85%, 90%, or 95% of the number of amino acid residues in referenced full length alpha-amylase (e.g. any one of SEQ ID NOs: 76-101, 121-174, 231 and 251-256). In other embodiments, the alpha-amylase may comprise the catalytic domain of any alpha-amylase described or referenced herein (e.g., the catalytic domain of any one of SEQ ID NOs: 76-101, 121-174, 231 and 251-256).

[0330] The alpha-amylase may be a variant of any one of the alpha-amylases described supra (e.g., any one of SEQ ID NOs: 76-101, 121-174, 231 and 251-256). In one embodiment, the alpha-amylase has a mature polypeptide sequence of at least 60%, e.g., at least 65%, 70%, 75%, 80%, 85%, 90%, 95%, 97%, 98%, 99%, or 100% sequence identity to any one of the alpha-amylases described supra (e.g., any one of SEQ ID NOs: 76-101, 121-174, 231 and 251-256).

[0331] Examples of suitable amino acid changes, such as conservative substitutions that do not significantly affect the folding and/or activity of the alpha-amylase, are described herein.

[0332] In one embodiment, the alpha-amylase has a mature polypeptide sequence that differs by no more than ten amino acids, e.g., by no more than five amino acids, by no more than four amino acids, by no more than three amino acids, by no more than two amino acids, or by one amino acid from the amino acid sequence of any one of the alpha-amylases described supra (e.g., any one of SEQ ID NOs: 76-101, 121-174, 231 and 251-256). In one embodiment, the alpha-amylase has an amino acid substitution, deletion, and/or insertion of one or more (e.g., two, several) of amino acid sequence of any one of the alpha-amylases described supra (e.g., any one of SEQ ID NOs: 76-101, 121-174, 231 and 251-256). In some embodiments, the total number of amino acid substitutions, deletions and/or insertions is not more than 10, e.g., not more than 9, 8, 7, 6, 5, 4, 3, 2, or 1.

[0333] In some embodiments, the alpha-amylase has at least 20%, e.g., at least 40%, at least 50%, at least 60%, at least 70%, at least 80%, at least 90%, at least 95%, at least 96%, at least 97%, at least 98%, at least 99%, or 100% of the alpha-amylase activity of any alpha-amylase described or referenced herein (e.g., any one of SEQ ID NOs: 76-101, 121-174, 231 and 251-256) under the same conditions.

[0334] In one embodiment, the alpha-amylase coding sequence hybridizes under at least low stringency conditions, e.g., medium stringency conditions, medium-high stringency conditions, high stringency conditions, or very high stringency conditions with the full-length complementary strand of the coding sequence from any alpha-amylase described or referenced herein (e.g., any one of SEQ ID NOs: 76-101, 121-174 and 231). In one embodiment, the alpha-amylase coding sequence has at least 65%, e.g., at least 70%, at least 75%, at least 80%, at least 85%, at least 85%, at least 90%, at least 91%, at least 92%, at least 93%, at least 94%, at least 95%, at least 96%, at least 97%, at least 98%, at least 99%, or 100% sequence identity with the coding sequence from any alpha-amylase described or referenced herein (e.g., any one of SEQ ID NOs: 76-101, 121-174, 231 and 251-256).

[0335] In one embodiment, the alpha-amylase comprises the coding sequence of any alpha-amylase described or referenced herein (any one of SEQ ID NOs: 76-101, 121-174, 231 and 251-256). In one embodiment, the alpha-amylase comprises a coding sequence that is a subsequence of the coding sequence from any alpha-amylase described or referenced herein, wherein the subsequence encodes a polypeptide having alpha-amylase activity. In one embodiment, the number of nucleotides residues in the subsequence is at least 75%, e.g., at least 80%, 85%, 90%, or 95% of the number of the referenced coding sequence.

[0336] The referenced alpha-amylase coding sequence of any related aspect or embodiment described herein can be the native coding sequence or a degenerate sequence, such as a codon-optimized coding sequence designed for use in a particular host cell (e.g., optimized for expression in Saccharomyces cerevisiae).

[0337] The alpha-amylase can also include fused polypeptides or cleavable fusion polypeptides, as described supra.

### Phospholipases

[0338] The host cells and fermenting organisms may express a heterologous phospholipase. The phospholipase may be any phospholipase that is suitable for the host cells, fermenting organism, and/or the methods described herein, such as a naturally occurring phospholipase (e.g., a native phospholipase from another species or an endogenous phospholipase expressed from a modified expression vector) or a variant thereof that retains phospholipase activity. Any phospholipase contemplated for expression by a host cell or fermenting organism described below is also contemplated for embodiments of the invention involving exogenous addition of a phospholipase (e.g., added before, during or after liquefaction and/or saccharification).

[0339] In some embodiments, the host cell or fermenting organism comprises a heterologous polynucleotide encoding a phospholipase, for example, as described in WO2018/075430, the content of which is hereby incorporated by reference. In some embodiments, the phospholipase is classified as a phospholipase A. In other embodiments, the phospholipase is classified as a phospholipase C. Any phospholipase described or referenced herein is contemplated for expression in the host cell or fermenting organism.

[0340] In some embodiments, the host cell or fermenting organism comprising a heterologous polynucleotide encoding a phospholipase has an increased level of phospholipase activity compared to the host cells without the heterologous polynucleotide encoding the phospholipase, when cultivated under the same conditions. In some embodiments, the host cell or fermenting organism has an increased level of phospholipase activity of at least 5%, e.g., at least 10%, at least 15%, at least 20%, at least 25%, at least 50%, at least 100%, at least 150%, at least 200%, at least 300%, or at 500% compared to the host cell or fermenting organism without the heterologous polynucleotide encoding the phospholipase, when cultivated under the same conditions.

[0341] Exemplary phospholipases that can be used with the host cells and/or the methods described herein include bacterial, yeast, or filamentous fungal phospholipases, e.g., derived from any of the microorganisms described or referenced herein.

[0342] Additional phospholipases that may be expressed with the host cells and fermenting organisms, and used with the methods described herein, and include, but are not limited to phospholipases shown in Table 4 (or derivatives thereof).

TABLE 4

| Donor Organism | SEQ ID NO: |
|---|---|
| (catalytic domain) | (mature polypeptide) |
| Thermomyces lanuginosus | 235 |
| Talaromyces leycettanus | 236 |
| Penicillium emersonii | 237 |
| Bacillus thuringiensis | 238 |
| Pseudomonas sp. | 239 |
| Kionochaeta sp. | 240 |
| Mariannaea pinicola | 241 |
| Fictibacillus macauensis | 242 |

[0343] Additional phospholipases contemplated for use with the present invention can be found in WO2018/075430 (the content of which is incorporated herein).

[0344] Additional polynucleotides encoding suitable phospholipases may be obtained from microorganisms of any genus, including those readily available within the UniProtKB database (www.uniprot.org).

[0345] The phospholipase coding sequences can also be used to design nucleic acid probes to identify and clone DNA encoding phospholipases from strains of different genera or species, as described supra.

[0346] The polynucleotides encoding phospholipases may also be identified and obtained from other sources including microorganisms isolated from nature (e.g., soil, composts, water, etc.) or DNA samples obtained directly from natural materials (e.g., soil, composts, water, etc.) as described supra.

[0347] Techniques used to isolate or clone polynucleotides encoding phospholipases are described supra.

[0348] In one embodiment, the phospholipase has a mature polypeptide sequence that comprises or consists of the amino acid sequence of any one of the phospholipases described or referenced herein (e.g., any one of SEQ ID NOs: 235, 236, 237, 238, 239, 240, 241, and 242). In another embodiment, the phospholipase has a mature polypeptide sequence that is a fragment of the any one of the phospholipases described or referenced herein (e.g., any one of SEQ ID NOs: 235, 236, 237, 238, 239, 240, 241, and 242). In one embodiment, the number of amino acid residues in the fragment is at least 75%, e.g., at least 80%, 85%, 90%, or 95% of the number of amino acid residues in referenced full length phospholipase (e.g. any one of SEQ ID NOs: 235, 236, 237, 238, 239, 240, 241, and 242). In other embodiments, the phospholipase may comprise the catalytic domain of any phospholipase described or referenced herein (e.g., the catalytic domain of any one of SEQ ID NOs: 235, 236, 237, 238, 239, 240, 241, and 242).

[0349] The phospholipase may be a variant of any one of the phospholipases described supra (e.g., any one of SEQ ID NOs: SEQ ID NOs: 235, 236, 237, 238, 239, 240, 241, and 242). In one embodiment, the phospholipase has a mature polypeptide sequence of at least 60%, e.g., at least 65%, 70%, 75%, 80%, 85%, 90%, 95%, 97%, 98%, 99%, or 100% sequence identity to any one of the phospholipases described supra (e.g., any one of SEQ ID NOs: 235, 236, 237, 238, 239, 240, 241, and 242).

[0350] Examples of suitable amino acid changes, such as conservative substitutions that do not significantly affect the folding and/or activity of the phospholipase, are described herein.

[0351] In one embodiment, the phospholipase has a mature polypeptide sequence that differs by no more than ten amino acids, e.g., by no more than five amino acids, by no more than four amino acids, by no more than three amino acids, by no more than two amino acids, or by one amino acid from the amino acid sequence of any one of the phospholipases described supra (e.g., any one of SEQ ID NOs: 235, 236, 237, 238, 239, 240, 241, and 242). In one embodiment, the phospholipase has an amino acid substitution, deletion, and/or insertion of one or more (e.g., two, several) of amino acid sequence of any one of the phospholipases described supra (e.g., any one of SEQ ID NOs: 235, 236, 237, 238, 239, 240, 241, and 242). In some embodiments, the total number of amino acid substitutions, deletions and/or insertions is not more than 10, e.g., not more than 9, 8, 7, 6, 5, 4, 3, 2, or 1.

[0352] In some embodiments, the phospholipase has at least 20%, e.g., at least 40%, at least 50%, at least 60%, at least 70%, at least 80%, at least 90%, at least 95%, at least 96%, at least 97%, at least 98%, at least 99%, or 100% of the phospholipase activity of any phospholipase described or referenced herein (e.g., any one of SEQ ID NOs: 235, 236, 237, 238, 239, 240, 241, and 242) under the same conditions.

[0353] In one embodiment, the phospholipase coding sequence hybridizes under at least low stringency conditions, e.g., medium stringency conditions, medium-high stringency conditions, high stringency conditions, or very high stringency conditions with the full-length complementary strand of the coding sequence from any phospholipase described or referenced herein (e.g., a coding sequence for a phospholipase of SEQ ID NO: 235, 236, 237, 238, 239, 240, 241 or 242). In one embodiment, the phospholipase coding sequence has at least 65%, e.g., at least 70%, at least 75%, at least 80%, at least 85%, at least 85%, at least 90%, at least 91%, at least 92%, at least 93%, at least 94%, at least 95%, at least 96%, at least 97%, at least 98%, at least 99%, or 100% sequence identity with the coding sequence from any phospholipase described or referenced herein (e.g., a coding sequence for a phospholipase of SEQ ID NO: 235, 236, 237, 238, 239, 240, 241 or 242).

[0354] In one embodiment, the phospholipase comprises the coding sequence of any phospholipase described or referenced herein (e.g., a coding sequence for a phospholipase of SEQ ID NO: 235, 236, 237, 238, 239, 240, 241 or 242). In one embodiment, the phospholipase comprises a coding sequence that is a subsequence of the coding sequence from any phospholipase described or referenced herein, wherein the subsequence encodes a polypeptide having phospholipase activity. In one embodiment, the number of nucleotides residues in the subsequence is at least 75%, e.g., at least 80%, 85%, 90%, or 95% of the number of the referenced coding sequence.

[0355] The referenced phospholipase coding sequence of any related aspect or embodiment described herein can be the native coding sequence or a degenerate sequence, such as a codon-optimized coding sequence designed for use in a particular host cell (e.g., optimized for expression in Saccharomyces cerevisiae).

[0356] The phospholipase can also include fused polypeptides or cleavable fusion polypeptides, as described supra.

### Trehalases

[0357] The host cells and fermenting organisms may express a heterologous trehalase. The trehalase can be any trehalase that is suitable for the host cells, fermenting organisms and/or their methods of use described herein, such as a naturally occurring trehalase or a variant thereof that retains trehalase activity. Any trehalase contemplated for expression by a host cell or fermenting organism described below is also contemplated for embodiments of the invention involving exogenous addition of a trehalase (e.g., added before, during or after liquefaction and/or saccharification).

[0358] In some embodiments, the host cell or fermenting organism comprising a heterologous polynucleotide encoding a trehalase has an increased level of trehalase activity compared to the host cells without the heterologous polynucleotide encoding the trehalase, when cultivated under the same conditions. In some embodiments, the host cell or fermenting organism has an increased level of trehalase activity of at least 5%, e.g., at least 10%, at least 15%, at least 20%, at least 25%, at least 50%, at least 100%, at least 150%, at least 200%, at least 300%, or at 500% compared to the host cell or fermenting organism without the heterologous polynucleotide encoding the trehalase, when cultivated under the same conditions.

[0359] Trehalases that may be expressed with the host cells and fermenting organisms, and used with the methods described herein include, but are not limited to, trehalases shown in Table 5 (or derivatives thereof).

TABLE 5

| Donor Organism | SEQ ID NO: |
|---|---|
| (catalytic domain) | (mature polypeptide) |
| Chaetomium megalocarpum | 175 |
| Lecanicillium psalliotae | 176 |
| Doratomyces sp | 177 |
| Mucor moelleri | 178 |
| Phialophora cyclaminis | 179 |
| Thielavia arenaria | 180 |
| Thielavia antarctica | 181 |
| Chaetomium sp | 182 |
| Chaetomium nigricolor | 183 |
| Chaetomium jodhpurense | 184 |
| Chaetomium piluliferum | 185 |
| Myceliophthora hinnulea | 186 |
| Chloridium virescens | 187 |
| Gelasinospora cratophora | 188 |
| Acidobacteriaceae bacterium | 189 |
| Acidobacterium capsulatum | 190 |
| Acidovorax wautersii | 191 |
| Xanthomonas arboricola | 192 |
| Kosakonia sacchari | 193 |
| Enterobacter sp | 194 |
| Saitozyma flava | 195 |
| Phaeotremella skinneri | 196 |
| Trichoderma asperellum | 197 |
| Corynascus sepedonium | 198 |
| Myceliophthora thermophila | 199 |
| Trichoderma reesei | 200 |
| Chaetomium virescens | 201 |
| Rhodothermus marinus | 202 |
| Myceliophthora sepedonium | 203 |
| Moelleriella libera | 204 |
| Acremonium dichromosporum | 205 |
| Fusarium sambucinum | 206 |
| Phoma sp | 207 |
| Lentinus similis | 208 |
| Diaporthe nobilis | 209 |
| Solicoccozyma terricola | 210 |
| Dioszegia cryoxerica | 211 |
| Talaromyces funiculosus | 212 |
| Hamigera avellanea | 213 |
| Talaromyces ruber | 214 |
| Trichoderma lixii | 215 |
| Aspergillus cervinus | 216 |
| Rasamsonia brevistipitata | 217 |
| Acremonium curvulum | 218 |
| Talaromyces piceae | 219 |
| Penicillium sp | 220 |
| Talaromyces aurantiacus | 221 |
| Talaromyces pinophilus | 222 |
| Talaromyces leycettanus | 223 |
| Talaromyces variabilis | 224 |
| Aspergillus niger | 225 |
| Trichoderma reesei | 226 |

[0360] Additional polynucleotides encoding suitable trehalases may be derived from microorganisms of any suitable genus, including those readily available within the UniProtKB database (www.uniprot.org).

[0361] The trehalase coding sequences can also be used to design nucleic acid probes to identify and clone DNA encoding trehalases from strains of different genera or species, as described supra.

[0362] The polynucleotides encoding trehalases may also be identified and obtained from other sources including microorganisms isolated from nature (e.g., soil, composts, water, etc.) or DNA samples obtained directly from natural materials (e.g., soil, composts, water, etc.) as described supra.

[0363] Techniques used to isolate or clone polynucleotides encoding trehalases are described supra.

[0364] In one embodiment, the trehalase has a mature polypeptide sequence that comprises or consists of the amino acid sequence of any one of the trehalases described or referenced herein (e.g., any one of SEQ ID NOs: 175-226). In another embodiment, the trehalase has a mature polypeptide sequence that is a fragment of the any one of the trehalases described or referenced herein (e.g., any one of SEQ ID NOs: 175-226). In one embodiment, the number of amino acid residues in the fragment is at least 75%, e.g., at least 80%, 85%, 90%, or 95% of the number of amino acid residues in referenced full length trehalase (e.g. any one of SEQ ID NOs: 175-226). In other embodiments, the trehalase may comprise the catalytic domain of any trehalase described or referenced herein (e.g., the catalytic domain of any one of SEQ ID NOs: 175-226).

[0365] The trehalase may be a variant of any one of the trehalases described supra (e.g., any one of SEQ ID NOs: 175-226). In one embodiment, the trehalase has a mature polypeptide sequence of at least 60%, e.g., at least 65%, 70%, 75%, 80%, 85%, 90%, 95%, 97%, 98%, 99%, or 100% sequence identity to any one of the trehalases described supra (e.g., any one of SEQ ID NOs: 175-226).

[0366] Examples of suitable amino acid changes, such as conservative substitutions that do not significantly affect the folding and/or activity of the trehalase, are described herein.

[0367] In one embodiment, the trehalase has a mature polypeptide sequence that differs by no more than ten amino acids, e.g., by no more than five amino acids, by no more than four amino acids, by no more than three amino acids, by no more than two amino acids, or by one amino acid from the amino acid sequence of any one of the trehalases described supra (e.g., any one of SEQ ID NOs: 175-226). In one embodiment, the trehalase has an amino acid substitution, deletion, and/or insertion of one or more (e.g., two, several) of amino acid sequence of any one of the trehalases described supra (e.g., any one of SEQ ID NOs: 175-226). In some embodiments, the total number of amino acid substitutions, deletions and/or insertions is not more than 10, e.g., not more than 9, 8, 7, 6, 5, 4, 3, 2, or 1.

[0368] In some embodiments, the trehalase has at least 20%, e.g., at least 40%, at least 50%, at least 60%, at least 70%, at least 80%, at least 90%, at least 95%, at least 96%, at least 97%, at least 98%, at least 99%, or 100% of the trehalase activity of any trehalase described or referenced herein (e.g., any one of SEQ ID NOs: 175-226) under the same conditions.

[0369] In one embodiment, the trehalase coding sequence hybridizes under at least low stringency conditions, e.g., medium stringency conditions, medium-high stringency conditions, high stringency conditions, or very high stringency conditions with the full-length complementary strand of the coding sequence from any trehalase described or referenced herein (e.g., any one of SEQ ID NOs: 175-226). In one embodiment, the trehalase coding sequence has at least 65%, e.g., at least 70%, at least 75%, at least 80%, at least 85%, at least 85%, at least 90%, at least 91%, at least 92%, at least 93%, at least 94%, at least 95%, at least 96%, at least 97%, at least 98%, at least 99%, or 100% sequence identity with the coding sequence from any trehalase described or referenced herein (e.g., any one of SEQ ID NOs: 175-226).

[0370] In one embodiment, the trehalase comprises the coding sequence of any trehalase described or referenced herein (any one of SEQ ID NOs: 175-226). In one embodiment, the trehalase comprises a coding sequence that is a subsequence of the coding sequence from any trehalase described or referenced herein, wherein the subsequence encodes a polypeptide having trehalase activity. In one embodiment, the number of nucleotides residues in the subsequence is at least 75%, e.g., at least 80%, 85%, 90%, or 95% of the number of the referenced coding sequence.

[0371] The referenced trehalase coding sequence of any related aspect or embodiment described herein can be the native coding sequence or a degenerate sequence, such as a codon-optimized coding sequence designed for use in a particular host cell (e.g., optimized for expression in Saccharomyces cerevisiae).

[0372] The trehalase can also include fused polypeptides or cleavable fusion polypeptides, as described supra.

### Proteases

[0373] The host cells and fermenting organisms may express a heterologous protease. The protease can be any protease that is suitable for the host cells and fermenting organisms and/or their methods of use described herein, such as a naturally occurring protease or a variant thereof that retains protease activity. Any protease contemplated for expression by a host cell or fermenting organism described below is also contemplated for embodiments of the invention involving exogenous addition of a protease (e.g., added before, during or after liquefaction and/or saccharification).

[0374] Proteases are classified on the basis of their catalytic mechanism into the following groups: Serine proteases (S), Cysteine proteases (C), Aspartic proteases (A), Metallo proteases (M), and Unknown, or as yet unclassified, proteases (U), see Handbook of Proteolytic Enzymes, A. J. Barrett, N. D. Rawlings, J. F. Woessner (eds), Academic Press (1998), in particular the general introduction part.

[0375] Protease activity can be measured using any suitable assay, in which a substrate is employed, that includes peptide bonds relevant for the specificity of the protease in question. Assay-pH and assay-temperature are likewise to be adapted to the protease in question. Examples of assay-pH-values are pH 6, 7, 8, 9, 10, or 11. Examples of assay-temperatures are 30, 35, 37, 40, 45, 50, 55, 60, 65, 70 or 80° C.

[0376] In some embodiments, the host cell or fermenting organism comprising a heterologous polynucleotide encoding a protease has an increased level of protease activity compared to the host cell or fermenting organism without the heterologous polynucleotide encoding the protease, when cultivated under the same conditions. In some embodiments, the host cell or fermenting organism has an increased level of protease activity of at least 5%, e.g., at least 10%, at least 15%, at least 20%, at least 25%, at least 50%, at least 100%, at least 150%, at least 200%, at least 300%, or at 500% compared to the host cell or fermenting organism without the heterologous polynucleotide encoding the protease, when cultivated under the same conditions.

[0377] Exemplary proteases that may be expressed with the host cells and fermenting organisms, and used with the methods described herein include, but are not limited to, proteases shown in Table 6 (or derivatives thereof).

TABLE 6

| Donor Organism | SEQ ID NO: | |
|---|---|---|
| (catalytic domain) | (mature polypeptide) | Family |
| Aspergillus niger | 9 | A1 |
| Trichoderma reesei | 10 | |
| Thermoascus aurantiacus | 11 | M35 |
| Dichomitus squalens | 12 | S53 |
| Nocardiopsis prasina | 13 | S1 |
| Penicillium simplicissimum | 14 | S10 |
| Aspergillus niger | 15 | |
| Meriphilus giganteus | 16 | S53 |
| Lecanicillium sp. WMM742 | 17 | S53 |
| Talaromyces proteolyticus | 18 | S53 |
| Penicillium ranomafanaense | 19 | A1A |
| Aspergillus oryzae | 20 | S53 |
| Talaromyces liani | 21 | S10 |
| Thermoascus thermophilus | 22 | S53 |
| Pyrococcus furiosus | 23 | |
| Trichoderma reesei | 24 | |
| Rhizomucor miehei | 25 | |
| Lenzites betulinus | 26 | S53 |
| Neolentinus lepideus | 27 | S53 |
| Thermococcus sp. | 28 | S8 |
| Thermococcus sp. | 29 | S8 |
| Thermomyces lanuginosus | 30 | S53 |
| Thermococcus thioreducens | 31 | S53 |
| Polyporus arcularius | 32 | S53 |
| Ganoderma lucidum | 33 | S53 |
| Ganoderma lucidum | 34 | S53 |
| Ganoderma lucidum | 35 | S53 |
| Trametes sp. AH28-2 | 36 | S53 |
| Cinereomyces lindbladii | 37 | S53 |
| Trametes versicolor O82DDP | 38 | S53 |
| Paecilomyces hepiali | 39 | S53 |
| Isaria tenuipes | 40 | S53 |
| Aspergillus tamarii | 41 | S53 |
| Aspergillus brasiliensis | 42 | S53 |
| Aspergillus iizukae | 43 | S53 |
| Penicillium sp-72364 | 44 | S10 |
| Aspergillus denticulatus | 45 | S10 |
| Hamigera sp. t184-6 | 46 | S10 |
| Penicillium janthinellum | 47 | S10 |
| Penicillium vasconiae | 48 | S10 |
| Hamigera paravellanea | 49 | S10 |
| Talaromyces variabilis | 50 | S10 |
| Penicillium arenicola | 51 | S10 |
| Nocardiopsis kunsanensis | 52 | S1 |
| Streptomyces parvulus | 53 | S1 |
| Saccharopolyspora endophytica | 54 | S1 |
| luteus cell wall enrichments K | 55 | S1 |
| Saccharothrix australiensis | 56 | S1 |
| Nocardiopsis baichengensis | 57 | S1 |
| Streptomyces sp. SM15 | 58 | S1 |
| Actinoalloteichus spitiensis | 59 | S1 |
| Byssochlamys verrucosa | 60 | M35 |
| Hamigera terricola | 61 | M35 |
| Aspergillus tamarii | 62 | M35 |
| Aspergillus niveus | 63 | M35 |
| Penicillium sclerotiorum | 64 | A1 |
| Penicillium bilaiae | 65 | A1 |
| Penicillium antarcticum | 66 | A1 |
| Penicillium sumatrense | 67 | A1 |
| Trichoderma lixii | 68 | A1 |
| Trichoderma brevicompactum | 69 | A1 |
| Penicillium cinnamopurpureum | 70 | A1 |
| Bacillus licheniformis | 71 | S8 |
| Bacillus subtilis | 72 | S8 |
| Trametes cf versicol | 73 | S53 |

[0378] Additional polynucleotides encoding suitable proteases may be derived from microorganisms of any suitable genus, including those readily available within the UniProtKB database (www.uniprot.org).

[0379] In one embodiment, the protease is derived from Aspergillus, such as the Aspergillus niger protease of SEQ ID NO: 9, the Aspergillus tamarii protease of SEQ ID NO: 41, or the Aspergillus denticulatus protease of SEQ ID NO: 45. In one embodiment, the protease is derived from Dichomitus, such as the Dichomitus squalens protease of SEQ ID NO: 12. In one embodiment, the protease is derived from Penicillium, such as the Penicillium simplicissimum protease of SEQ ID NO: 14, the Penicillium antarcticum protease of SEQ ID NO: 66, or the Penicillium sumatrense protease of SEQ ID NO: 67. In one embodiment, the protease is derived from Meriphilus, such as the Meriphilus giganteus protease of SEQ ID NO: 16. In one embodiment, the protease is derived from Talaromyces, such as the Talaromyces liani protease of SEQ ID NO: 21. In one embodiment, the protease is derived from Thermoascus, such as the Thermoascus thermophilus protease of SEQ ID NO: 22. In one embodiment, the protease is derived from Ganoderma, such as the Ganoderma lucidum protease of SEQ ID NO: 33. In one embodiment, the protease is derived from Hamigera, such as the Hamigera terricola protease of SEQ ID NO: 61. In one embodiment, the protease is derived from Trichoderma, such as the Trichoderma brevicompactum protease of SEQ ID NO: 69.

[0380] The protease coding sequences can also be used to design nucleic acid probes to identify and clone DNA encoding proteases from strains of different genera or species, as described supra.

[0381] The polynucleotides encoding proteases may also be identified and obtained from other sources including microorganisms isolated from nature (e.g., soil, composts, water, etc.) or DNA samples obtained directly from natural materials (e.g., soil, composts, water, etc.) as described supra.

[0382] Techniques used to isolate or clone polynucleotides encoding proteases are described supra.

[0383] In one embodiment, the protease has a mature polypeptide sequence that comprises or consists of the amino acid sequence of any one of SEQ ID NOs: 9-73 (e.g., any one of SEQ ID NOs: 9, 14, 16, 21, 22, 33, 41, 45, 61, 62, 66, 67, and 69; such as any one of SEQ NOs: 9, 14, 16, and 69). In another embodiment, the protease has a mature polypeptide sequence that is a fragment of the protease of any one of SEQ ID NOs: 9-73 (e.g., wherein the fragment has protease activity). In one embodiment, the number of amino acid residues in the fragment is at least 75%, e.g., at least 80%, 85%, 90%, or 95% of the number of amino acid residues in referenced full length protease (e.g. any one of SEQ ID NOs: 9-73). In other embodiments, the protease may comprise the catalytic domain of any protease described or referenced herein (e.g., the catalytic domain of any one of SEQ ID NOs: 9-73).

[0384] The protease may be a variant of any one of the proteases described supra (e.g., any one of SEQ ID NOs: 9-73. In one embodiment, the protease has a mature polypeptide sequence of at least 60%, e.g., at least 65%, 70%, 75%, 80%, 85%, 90%, 95%, 97%, 98%, 99%, or 100% sequence identity to any one of the proteases described supra (e.g., any one of SEQ ID NOs: 9-73).

[0385] Examples of suitable amino acid changes, such as conservative substitutions that do not significantly affect the folding and/or activity of the protease, are described herein.

[0386] In one embodiment, the protease has a mature polypeptide sequence that differs by no more than ten amino acids, e.g., by no more than five amino acids, by no more than four amino acids, by no more than three amino acids, by no more than two amino acids, or by one amino acid from the amino acid sequence of any one of the proteases described supra (e.g., any one of SEQ ID NOs: 9-73). In one embodiment, the protease has an amino acid substitution, deletion, and/or insertion of one or more (e.g., two, several) of amino acid sequence of any one of the proteases described supra (e.g., any one of SEQ ID NOs: 9-73). In some embodiments, the total number of amino acid substitutions, deletions and/or insertions is not more than 10, e.g., not more than 9, 8, 7, 6, 5, 4, 3, 2, or 1.

[0387] In one embodiment, the protease coding sequence hybridizes under at least low stringency conditions, e.g., medium stringency conditions, medium-high stringency conditions, high stringency conditions, or very high stringency conditions with the full-length complementary strand of the coding sequence from any protease described or referenced herein (e.g., any one of SEQ ID NOs: 9-73). In one embodiment, the protease coding sequence has at least 65%, e.g., at least 70%, at least 75%, at least 80%, at least 85%, at least 85%, at least 90%, at least 91%, at least 92%, at least 93%, at least 94%, at least 95%, at least 96%, at least 97%, at least 98%, at least 99%, or 100% sequence identity with the coding sequence from any protease described or referenced herein (e.g., any one of SEQ ID NOs: 9-73).

[0388] In one embodiment, the protease comprises the coding sequence of any protease described or referenced herein (any one of SEQ ID NOs: 9-73). In one embodiment, the protease comprises a coding sequence that is a subsequence of the coding sequence from any protease described or referenced herein, wherein the subsequence encodes a polypeptide having protease activity. In one embodiment, the number of nucleotides residues in the subsequence is at least 75%, e.g., at least 80%, 85%, 90%, or 95% of the number of the referenced coding sequence.

[0389] The referenced protease coding sequence of any related aspect or embodiment described herein can be the native coding sequence or a degenerate sequence, such as a codon-optimized coding sequence designed for use in a particular host cell (e.g., optimized for expression in Saccharomyces cerevisiae).

[0390] The protease can also include fused polypeptides or cleavable fusion polypeptides, as described supra.

[0391] In one embodiment, the protease used according to a process described herein is a Serine proteases. In one particular embodiment, the protease is a serine protease belonging to the family 53, e.g., an endo-protease, such as S53 protease from Meriphilus giganteus, Dichomitus squalens Trametes versicolor, Polyporus arcularius, Lenzites betulinus, Ganoderma lucidum, Neolentinus lepideus, or Bacillus sp. 19138, in a process for producing ethanol from a starch-containing material, the ethanol yield was improved, when the S53 protease was present/or added during saccharification and/or fermentation of either gelatinized or un-gelatinized starch. In one embodiment, the proteases is selected from: (a) proteases belonging to the EC 3.4.21 enzyme group; and/or (b) proteases belonging to the EC 3.4.14 enzyme group; and/or (c) Serine proteases of the peptidase family S53 that comprises two different types of peptidases: tripeptidyl aminopeptidases (exo-type) and endo-peptidases; as described in 1993, Biochem. J. 290:205-218 and in MEROPS protease database, release, 9.4 (31 Jan. 2011) (www.merops.ac.uk). The database is described in Rawlings, N. D., Barrett, A. J. and Bateman, A., 2010, “MEROPS: the peptidase database”, Nucl. Acids Res. 38: D227-D233.

[0392] For determining whether a given protease is a Serine protease, and a family S53 protease, reference is made to the above Handbook and the principles indicated therein. Such determination can be carried out for all types of proteases, be it naturally occurring or wild-type proteases; or genetically engineered or synthetic proteases.

[0393] Peptidase family S53 contains acid-acting endopeptidases and tripeptidyl-peptidases. The residues of the catalytic triad are Glu, Asp, Ser, and there is an additional acidic residue, Asp, in the oxyanion hole. The order of the residues is Glu, Asp, Asp, Ser. The Ser residue is the nucleophile equivalent to Ser in the Asp, His, Ser triad of subtilisin, and the Glu of the triad is a substitute for the general base, His, in subtilisin.

[0394] The peptidases of the S53 family tend to be most active at acidic pH (unlike the homologous subtilisins), and this can be attributed to the functional importance of carboxylic residues, notably Asp in the oxyanion hole. The amino acid sequences are not closely similar to those in family S8 (i.e. serine endopeptidase subtilisins and homologues), and this, taken together with the quite different active site residues and the resulting lower pH for maximal activity, provides for a substantial difference to that family. Protein folding of the peptidase unit for members of this family resembles that of subtilisin, having the clan type SB.

[0395] In one embodiment, the protease used according to a process described herein is a Cysteine proteases.

[0396] In one embodiment, the protease used according to a process described herein is a Aspartic proteases. Aspartic acid proteases are described in, for example, Handbook of Proteolytic Enzymes, Edited by A. J. Barrett, N. D. Rawlings and J. F. Woessner, Academic Press, San Diego, 1998, Chapter 270). Suitable examples of aspartic acid protease include, e.g., those disclosed in R. M. Berka et al. Gene, 96, 313 (1990)); (R. M. Berka et al. Gene, 125, 195-198 (1993)); and Gomi et al. Biosci. Biotech. Biochem. 57, 1095-1100 (1993), which are hereby incorporated by reference.

[0397] The protease also may be a metalloprotease, which is defined as a protease selected from the group consisting of:

[0398] (a) proteases belonging to EC 3.4.24 (metalloendopeptidases); preferably EC 3.4.24.39 (acid metallo proteinases);

[0399] (b) metalloproteases belonging to the M group of the above Handbook;

[0400] (c) metalloproteases not yet assigned to clans (designation: Clan MX), or belonging to either one of clans MA, MB, MC, MD, ME, MF, MG, MH (as defined at pp. 989-991 of the above Handbook);

[0401] (d) other families of metalloproteases (as defined at pp. 1448-1452 of the above Handbook);

[0402] (e) metalloproteases with a HEXXH motif;

[0403] (f) metalloproteases with an HEFTH motif;

[0404] (g) metalloproteases belonging to either one of families M3, M26, M27, M32, M34, M35, M36, M41, M43, or M47 (as defined at pp. 1448-1452 of the above Handbook);

[0405] (h) metalloproteases belonging to the M28E family; and

[0406] (i) metalloproteases belonging to family M35 (as defined at pp. 1492-1495 of the above Handbook).

[0407] In other particular embodiments, metalloproteases are hydrolases in which the nucleophilic attack on a peptide bond is mediated by a water molecule, which is activated by a divalent metal cation. Examples of divalent cations are zinc, cobalt or manganese. The metal ion may be held in place by amino acid ligands. The number of ligands may be five, four, three, two, one or zero. In a particular embodiment the number is two or three, preferably three.

[0408] There are no limitations on the origin of the metalloprotease used in a process of the invention. In an embodiment the metalloprotease is classified as EC 3.4.24, preferably EC 3.4.24.39. In one embodiment, the metalloprotease is an acid-stable metalloprotease, e.g., a fungal acid-stable metalloprotease, such as a metalloprotease derived from a strain of the genus Thermoascus, preferably a strain of Thermoascus aurantiacus, especially Thermoascus aurantiacus CGMCC No. 0670 (classified as EC 3.4.24.39). In another embodiment, the metalloprotease is derived from a strain of the genus Aspergillus, preferably a strain of Aspergillus oryzae.

[0409] In one embodiment the metalloprotease has a degree of sequence identity to amino acids −178 to 177, −159 to 177, or preferably amino acids 1 to 177 (the mature polypeptide) of SEQ ID NO: 1 of WO 2010/008841 (a Thermoascus aurantiacus metalloprotease) of at least 80%, at least 82%, at least 85%, at least 90%, at least 95%, or at least 97%; and which have metalloprotease activity. In particular embodiments, the metalloprotease consists of an amino acid sequence with a degree of identity to SEQ ID NO: 1 as mentioned above.

[0410] The Thermoascus aurantiacus metalloprotease is a preferred example of a metalloprotease suitable for use in a process of the invention. Another metalloprotease is derived from Aspergillus oryzae and comprises the sequence of SEQ ID NO: 11 disclosed in WO 2003/048353, or amino acids −23-353; −23-374; −23-397; 1-353; 1-374; 1-397; 177-353; 177-374; or 177-397 thereof, and SEQ ID NO: 10 disclosed in WO 2003/048353.

[0411] Another metalloprotease suitable for use in a process of the invention is the Aspergillus oryzae metalloprotease comprising SEQ ID NO: 5 of WO 2010/008841, or a metalloprotease is an isolated polypeptide which has a degree of identity to SEQ ID NO: 5 of at least about 80%, at least 82%, at least 85%, at least 90%, at least 95%, or at least 97%; and which have metalloprotease activity. In particular embodiments, the metalloprotease consists of the amino acid sequence of SEQ ID NO: 5 of WO 2010/008841.

[0412] In a particular embodiment, a metalloprotease has an amino acid sequence that differs by forty, thirty-five, thirty, twenty-five, twenty, or by fifteen amino acids from amino acids −178 to 177, −159 to 177, or +1 to 177 of the amino acid sequences of the Thermoascus aurantiacus or Aspergillus oryzae metalloprotease.

[0413] In another embodiment, a metalloprotease has an amino acid sequence that differs by ten, or by nine, or by eight, or by seven, or by six, or by five amino acids from amino acids −178 to 177, −159 to 177, or +1 to 177 of the amino acid sequences of these metalloproteases, e.g., by four, by three, by two, or by one amino acid.

[0414] In particular embodiments, the metalloprotease a) comprises or b) consists of

[0415] i) the amino acid sequence of amino acids −178 to 177, −159 to 177, or +1 to 177 of SEQ ID NO:1 of WO 2010/008841;

[0416] ii) the amino acid sequence of amino acids −23-353, −23-374, −23-397, 1-353, 1-374, 1-397, 177-353, 177-374, or 177-397 of SEQ ID NO: 3 of WO 2010/008841;

[0417] iii) the amino acid sequence of SEQ ID NO: 5 of WO 2010/008841; or allelic variants, or fragments, of the sequences of i), ii), and iii) that have protease activity.

[0418] A fragment of amino acids −178 to 177, −159 to 177, or +1 to 177 of SEQ ID NO: 1 of WO 2010/008841 or of amino acids −23-353, −23-374, −23-397, 1-353, 1-374, 1-397, 177-353, 177-374, or 177-397 of SEQ ID NO: 3 of WO 2010/008841; is a polypeptide having one or more amino acids deleted from the amino and/or carboxyl terminus of these amino acid sequences. In one embodiment a fragment contains at least 75 amino acid residues, or at least 100 amino acid residues, or at least 125 amino acid residues, or at least 150 amino acid residues, or at least 160 amino acid residues, or at least 165 amino acid residues, or at least 170 amino acid residues, or at least 175 amino acid residues.

[0419] To determine whether a given protease is a metallo protease or not, reference is made to the above “Handbook of Proteolytic Enzymes” and the principles indicated therein. Such determination can be carried out for all types of proteases, be it naturally occurring or wild-type proteases; or genetically engineered or synthetic proteases.

[0420] The protease may be a variant of, e.g., a wild-type protease, having thermostability properties defined herein. In one embodiment, the thermostable protease is a variant of a metallo protease. In one embodiment, the thermostable protease used in a process described herein is of fungal origin, such as a fungal metallo protease, such as a fungal metallo protease derived from a strain of the genus Thermoascus, preferably a strain of Thermoascus aurantiacus, especially Thermoascus aurantiacus CGMCC No. 0670 (classified as EC 3.4.24.39).

[0421] In one embodiment, the thermostable protease is a variant of the mature part of the metallo protease shown in SEQ ID NO: 2 disclosed in WO 2003/048353 or the mature part of SEQ ID NO: 1 in WO 2010/008841 further with one of the following substitutions or combinations of substitutions:

[0422] S5*+D79L+S87P+A112P+D142L;

[0423] D79L+S87P+A112P+T124V+D142L;

[0424] S5*+N26R+D79L+S87P+A112P+D142L;

[0425] N26R+T46R+D79L+S87P+A112P+D142L;

[0426] T46R+D79L+S87P+T116V+D142L;

[0427] D79L+P81R+S87P+A112P+D142L;

[0428] A27K+D79L+S87P+A112P+T124V+D142L;

[0429] D79L+Y82F+S87P+A112P+T124V+D142L;

[0430] D79L+Y82F+S87P+A112P+T124V+D142L;

[0431] D79L+S87P+A112P+T124V+A126V+D142L;

[0432] D79L+S87P+A112P+D142L;

[0433] D79L+Y82F+S87P+A112P+D142L;

[0434] S38T+D79L+S87P+A112P+A126V+D142L;

[0435] D79L+Y82F+S87P+A112P+A126V+D142L;

[0436] A27K+D79L+S87P+A112P+A126V+D142L;

[0437] D79L+S87P+N98C+A112P+G135C+D142L;

[0438] D79L+S87P+A112P+D142L+T141C+M161C;

[0439] S36P+D79L+S87P+A112P+D142L;

[0440] A37P+D79L+S87P+A112P+D142L;

[0441] S49P+D79L+S87P+A112P+D142L;

[0442] S50P+D79L+S87P+A112P+D142L;

[0443] D79L+S87P+D104P+A112P+D142L;

[0444] D79L+Y82F+S87G+A112P+D142L;

[0445] S70V+D79L+Y82F+S87G+Y97W+A112P+D142L;

[0446] D79L+Y82F+S87G+Y97W+D104P+A112P+D142L;

[0447] S70V+D79L+Y82F+S87G+A112P+D142L;

[0448] D79L+Y82F+S87G+D104P+A112P+D142L;

[0449] D79L+Y82F+S87G+A112P+A126V+D142L;

[0450] Y82F+S87G+S70V+D79L+D104P+A112P+D142L;

[0451] Y82F+S87G+D79L+D104P+A112P+A126V+D142L;

[0452] A27K+D79L+Y82F+S87G+D104P+A112P+A126V+D142L;

[0453] A27K+Y82F+S87G+D104P+A112P+A126V+D142L;

[0454] A27K+D79L+Y82F+D104P+A112P+A126V+D142L;

[0455] A27K+Y82F+D104P+A112P+A126V+D142L;

[0456] A27K+D79L+S87P+A112P+D142L; and

[0457] D79L+S87P+D142L.

[0458] In one embodiment, the thermostable protease is a variant of the metallo protease disclosed as the mature part of SEQ ID NO: 2 disclosed in WO 2003/048353 or the mature part of SEQ ID NO: 1 in WO 2010/008841 with one of the following substitutions or combinations of substitutions:

[0459] D79L+S87P+A112P+D142L;

[0460] D79L+S87P+D142L; and

[0461] A27K+D79L+Y82F+S87G+D104P+A112P+A126V+D142L.

[0462] In one embodiment, the protease variant has at least 75% identity preferably at least 80%, more preferably at least 85%, more preferably at least 90%, more preferably at least 91%, more preferably at least 92%, even more preferably at least 93%, most preferably at least 94%, and even most preferably at least 95%, such as even at least 96%, at least 97%, at least 98%, at least 99%, but less than 100% identity to the mature part of the polypeptide of SEQ ID NO: 2 disclosed in WO 2003/048353 or the mature part of SEQ ID NO: 1 in WO 2010/008841.

[0463] The thermostable protease may also be derived from any bacterium as long as the protease has the thermostability properties.

[0464] In one embodiment, the thermostable protease is derived from a strain of the bacterium Pyrococcus, such as a strain of Pyrococcus furiosus (pfu protease).

[0465] In one embodiment, the protease is one shown as SEQ ID NO: 1 in U.S. Pat. No. 6,358,726-B1 (Takara Shuzo Company).

[0466] In one embodiment, the thermostable protease is a protease having a mature polypeptide sequence of at least 80% identity, such as at least 85%, such as at least 90%, such as at least 95%, such as at least 96%, such as at least 97%, such as at least 98%, such as at least 99% identity to SEQ ID NO: 1 in U.S. Pat. No. 6,358,726-B1. The Pyroccus furiosus protease can be purchased from Takara Bio, Japan.

[0467] The Pyrococcus furiosus protease may be a thermostable protease as described in SEQ ID NO: 13 of WO2018/098381. This protease (PfuS) was found to have a thermostability of 110% (80° C./70° C.) and 103% (90° C./70° C.) at pH 4.5 determined.

[0468] In one embodiment a thermostable protease used in a process described herein has a thermostability value of more than 20% determined as Relative Activity at 80° C./70° C. determined as described in Example 2 of WO2018/098381.

[0469] In one embodiment, the protease has a thermostability of more than 30%, more than 40%, more than 50%, more than 60%, more than 70%, more than 80%, more than 90%, more than 100%, such as more than 105%, such as more than 110%, such as more than 115%, such as more than 120% determined as Relative Activity at 80° C./70° C.

[0470] In one embodiment, protease has a thermostability of between 20 and 50%, such as between 20 and 40%, such as 20 and 30% determined as Relative Activity at 80° C./70° C. In one embodiment, the protease has a thermostability between 50 and 115%, such as between 50 and 70%, such as between 50 and 60%, such as between 100 and 120%, such as between 105 and 115% determined as Relative Activity at 80° C./70° C.

[0471] In one embodiment, the protease has a thermostability value of more than 10% determined as Relative Activity at 85° C./70° C. determined as described in Example 2 of WO2018/098381.

[0472] In one embodiment, the protease has a thermostability of more than 10%, such as more than 12%, more than 14%, more than 16%, more than 18%, more than 20%, more than 30%, more than 40%, more that 50%, more than 60%, more than 70%, more than 80%, more than 90%, more than 100%, more than 110% determined as Relative Activity at 85° C./70° C.

[0473] In one embodiment, the protease has a thermostability of between 10% and 50%, such as between 10% and 30%, such as between 10% and 25% determined as Relative Activity at 85° C./70° C.

[0474] In one embodiment, the protease has more than 20%, more than 30%, more than 40%, more than 50%, more than 60%, more than 70%, more than 80%, more than 90% determined as Remaining Activity at 80° C.; and/or the protease has more than 20%, more than 30%, more than 40%, more than 50%, more than 60%, more than 70%, more than 80%, more than 90% determined as Remaining Activity at 84° C.

[0475] Determination of “Relative Activity” and “Remaining Activity” is done as described in Example 2 of WO2018/098381.

[0476] In one embodiment, the protease may have a thermostability for above 90, such as above 100 at 85° C. as determined using the Zein-BCA assay as disclosed in Example 3 of WO2018/098381.

[0477] In one embodiment, the protease has a thermostability above 60%, such as above 90%, such as above 100%, such as above 110% at 85° C. as determined using the Zein-BCA assay of WO2018/098381.

[0478] In one embodiment, protease has a thermostability between 60-120, such as between 70-120%, such as between 80-120%, such as between 90-120%, such as between 100-120%, such as 110-120% at 85° C. as determined using the Zein-BCA assay of WO2018/098381.

[0479] In one embodiment, the thermostable protease has at least 20%, such as at least 30%, such as at least 40%, such as at least 50%, such as at least 60%, such as at least 70%, such as at least 80%, such as at least 90%, such as at least 95%, such as at least 100% of the activity of the JTP196 protease variant or Protease Pfu determined by the AZCL-casein assay of WO2018/098381, and described herein.

[0480] In one embodiment, the thermostable protease has at least 20%, such as at least 30%, such as at least 40%, such as at least 50%, such as at least 60%, such as at least 70%, such as at least 80%, such as at least 90%, such as at least 95%, such as at least 100% of the protease activity of the Protease 196 variant or Protease Pfu determined by the AZCL-casein assay of WO2018/098381.

### Pullulanases

[0481] The host cells and fermenting organisms may express a heterologous pullulanase. The pullulanase can be any protease that is suitable for the host cells and fermenting organisms and/or their methods of use described herein, such as a naturally occurring pullulanase or a variant thereof that retains pullulanase activity. Any pullulanase contemplated for expression by a host cell or fermenting organism described below is also contemplated for embodiments of the invention involving exogenous addition of a pullulanase (e.g., added before, during or after liquefaction and/or saccharification).

[0482] In some embodiments, the host cell or fermenting organism comprising a heterologous polynucleotide encoding a pullulanase has an increased level of pullulanase activity compared to the host cells without the heterologous polynucleotide encoding the pullulanase, when cultivated under the same conditions. In some embodiments, the host cell or fermenting organism has an increased level of pullulanase activity of at least 5%, e.g., at least 10%, at least 15%, at least 20%, at least 25%, at least 50%, at least 100%, at least 150%, at least 200%, at least 300%, or at 500% compared to the host cell or fermenting organism without the heterologous polynucleotide encoding the pullulanase, when cultivated under the same conditions.

[0483] Exemplary pullulanases that can be used with the host cells and/or the methods described herein include bacterial, yeast, or filamentous fungal pullulanases, e.g., obtained from any of the microorganisms described or referenced herein.

[0484] Contemplated pullulanases include the pullulanases from Bacillus amyloderamificans disclosed in U.S. Pat. No. 4,560,651 (hereby incorporated by reference), the pullulanase disclosed as SEQ ID NO: 2 in WO 01/151620 (hereby incorporated by reference), the Bacillus deramificans disclosed as SEQ ID NO: 4 in WO 01/151620 (hereby incorporated by reference), and the pullulanase from Bacillus acidopullulyticus disclosed as SEQ ID NO: 6 in WO 01/151620 (hereby incorporated by reference) and also described in FEMS Mic. Let. (1994) 115, 97-106.

[0485] Additional pullulanases contemplated include the pullulanases from Pyrococcus woesei, specifically from Pyrococcus woesei DSM No. 3773 disclosed in WO92/02614.

[0486] In one embodiment, the pullulanase is a family GH57 pullulanase. In one embodiment, the pullulanase includes an X47 domain as disclosed in U.S. 61/289,040 published as WO 2011/087836 (which are hereby incorporated by reference). More specifically the pullulanase may be derived from a strain of the genus Thermococcus, including Thermococcus litoralis and Thermococcus hydrothermalis, such as the Thermococcus hydrothermalis pullulanase truncated at site X4 right after the X47 domain (i.e., amino acids 1-782). The pullulanase may also be a hybrid of the Thermococcus litoralis and Thermococcus hydrothermalis pullulanases or a T. hydrothermalis/T. litoralis hybrid enzyme with truncation site X4 disclosed in U.S. 61/289,040 published as WO 2011/087836 (which is hereby incorporated by reference).

[0487] In another embodiment, the pullulanase is one comprising an X46 domain disclosed in WO 2011/076123 (Novozymes).

[0488] The pullulanase may be added in an effective amount which include the preferred amount of about 0.0001-10 mg enzyme protein per gram DS, preferably 0.0001-0.10 mg enzyme protein per gram DS, more preferably 0.0001-0.010 mg enzyme protein per gram DS. Pullulanase activity may be determined as NPUN. An Assay for determination of NPUN is described in WO2018/098381.

[0489] Suitable commercially available pullulanase products include PROMOZYME D, PROMOZYME™ D2 (Novozymes A/S, Denmark), OPTIMAX L-300 (DuPont-Danisco, USA), and AMANO 8 (Amano, Japan).

[0490] In one embodiment, the pullulanase is derived from the Bacillus subtilis pullulanase of SEQ ID NO: 114. In one embodiment, the pullulanase is derived from the Bacillus licheniformis pullulanase of SEQ ID NO: 115. In one embodiment, the pullulanase is derived from the Oryza sativa pullulanase of SEQ ID NO: 116. In one embodiment, the pullulanase is derived from the Triticum aestivum pullulanase of SEQ ID NO: 117. In one embodiment, the pullulanase is derived from the Clostridium phytofermentans pullulanase of SEQ ID NO: 118. In one embodiment, the pullulanase is derived from the Streptomyces avermitilis pullulanase of SEQ ID NO: 119. In one embodiment, the pullulanase is derived from the Klebsiella pneumoniae pullulanase of SEQ ID NO: 120.

[0491] Additional pullulanases contemplated for use with the present invention can be found in WO2011/153516 (the content of which is incorporated herein).

[0492] Additional polynucleotides encoding suitable pullulanases may be obtained from microorganisms of any genus, including those readily available within the UniProtKB database (www.uniprot.org).

[0493] The pullulanase coding sequences can also be used to design nucleic acid probes to identify and clone DNA encoding pullulanases from strains of different genera or species, as described supra.

[0494] The polynucleotides encoding pullulanases may also be identified and obtained from other sources including microorganisms isolated from nature (e.g., soil, composts, water, etc.) or DNA samples obtained directly from natural materials (e.g., soil, composts, water, etc.) as described supra.

[0495] Techniques used to isolate or clone polynucleotides encoding pullulanases are described supra.

[0496] In one embodiment, the pullulanase has a mature polypeptide sequence that comprises or consists of the amino acid sequence of any one of the pullulanases described or referenced herein (e.g., any one of SEQ ID NOs: 114-120). In another embodiment, the pullulanase has a mature polypeptide sequence that is a fragment of the any one of the pullulanases described or referenced herein (e.g., any one of SEQ ID NOs: 114-120). In one embodiment, the number of amino acid residues in the fragment is at least 75%, e.g., at least 80%, 85%, 90%, or 95% of the number of amino acid residues in referenced full length pullulanase. In other embodiments, the pullulanase may comprise the catalytic domain of any pullulanase described or referenced herein (e.g., any one of SEQ ID NOs: 114-120).

[0497] The pullulanase may be a variant of any one of the pullulanases described supra (e.g., any one of SEQ ID NOs: 114-120). In one embodiment, the pullulanase has a mature polypeptide sequence of at least 60%, e.g., at least 65%, 70%, 75%, 80%, 85%, 90%, 95%, 97%, 98%, 99%, or 100% sequence identity to any one of the pullulanases described supra (e.g., any one of SEQ ID NOs: 114-120).

[0498] Examples of suitable amino acid changes, such as conservative substitutions that do not significantly affect the folding and/or activity of the pullulanase, are described herein.

[0499] In one embodiment, the pullulanase has a mature polypeptide sequence that differs by no more than ten amino acids, e.g., by no more than five amino acids, by no more than four amino acids, by no more than three amino acids, by no more than two amino acids, or by one amino acid from the amino acid sequence of any one of the pullulanases described supra (e.g., any one of SEQ ID NOs: 114-120). In one embodiment, the pullulanase has an amino acid substitution, deletion, and/or insertion of one or more (e.g., two, several) of amino acid sequence of any one of the pullulanases described supra (e.g., any one of SEQ ID NOs: 114-120). In some embodiments, the total number of amino acid substitutions, deletions and/or insertions is not more than 10, e.g., not more than 9, 8, 7, 6, 5, 4, 3, 2, or 1.

[0500] In some embodiments, the pullulanase has at least 20%, e.g., at least 40%, at least 50%, at least 60%, at least 70%, at least 80%, at least 90%, at least 95%, at least 96%, at least 97%, at least 98%, at least 99%, or 100% of the pullulanase activity of any pullulanase described or referenced herein under the same conditions (e.g., any one of SEQ ID NOs: 114-120).

[0501] In one embodiment, the pullulanase coding sequence hybridizes under at least low stringency conditions, e.g., medium stringency conditions, medium-high stringency conditions, high stringency conditions, or very high stringency conditions with the full-length complementary strand of the coding sequence from any pullulanase described or referenced herein (e.g., any one of SEQ ID NOs: 114-120). In one embodiment, the pullulanase coding sequence has at least 65%, e.g., at least 70%, at least 75%, at least 80%, at least 85%, at least 85%, at least 90%, at least 91%, at least 92%, at least 93%, at least 94%, at least 95%, at least 96%, at least 97%, at least 98%, at least 99%, or 100% sequence identity with the coding sequence from any pullulanase described or referenced herein (e.g., any one of SEQ ID NOs: 114-120).

[0502] In one embodiment, the pullulanase comprises the coding sequence of any pullulanase described or referenced herein (e.g., any one of SEQ ID NOs: 114-120). In one embodiment, the pullulanase comprises a coding sequence that is a subsequence of the coding sequence from any pullulanase described or referenced herein, wherein the subsequence encodes a polypeptide having pullulanase activity. In one embodiment, the number of nucleotides residues in the subsequence is at least 75%, e.g., at least 80%, 85%, 90%, or 95% of the number of the referenced coding sequence.

[0503] The referenced pullulanase coding sequence of any related aspect or embodiment described herein can be the native coding sequence or a degenerate sequence, such as a codon-optimized coding sequence designed for use in a particular host cell (e.g., optimized for expression in Saccharomyces cerevisiae).

[0504] The pullulanase can also include fused polypeptides or cleavable fusion polypeptides, as described supra.

### Gene Disruptions

[0505] The host cells and fermenting organisms described herein may also comprise one or more (e.g., two, several) gene disruptions, e.g., to divert sugar metabolism from undesired products to ethanol. In some embodiments, the recombinant host cells produce a greater amount of ethanol compared to the cell without the one or more disruptions when cultivated under identical conditions. In some embodiments, one or more of the disrupted endogenous genes is inactivated. In some embodiments, the host cell or fermenting organism is a diploid and has a disruption (e.g., inactivation) of both copies of the referenced gene.

[0506] In certain embodiments, the host cell or fermenting organism provided herein comprises a disruption of one or more endogenous genes encoding enzymes involved in producing alternate fermentative products such as glycerol or other byproducts such as acetate or diols. For example, the cells provided herein may comprise a disruption of one or more endogenous genes encoding a glycerol 3-phosphatase (GPP, E.C. 3.1.3.21, catalyzes conversion of glycerol-3 phosphate to glycerol), a glycerol 3-phosphate dehydrogenase (GPD, catalyzes reaction of dihydroxyacetone phosphate to glycerol 3-phosphate), glycerol kinase (catalyzes conversion of glycerol 3-phosphate to glycerol), dihydroxyacetone kinase (catalyzes conversion of dihydroxyacetone phosphate to dihydroxyacetone), glycerol dehydrogenase (catalyzes conversion of dihydroxyacetone to glycerol), and aldehyde dehydrogenase (ALD, e.g., converts acetaldehyde to acetate).

[0507] In some embodiments, the host cell or fermenting organism comprises a disruption to one or more endogenous genes encoding a glycerol 3-phosphatase (GPP). Saccharomyces cerevisiae has two glycerol-3-phosphate phosphatase paralogs encoding GPP1 (UniProt No. P41277; SEQ ID NO: 402) and GPP2 (UniProt No. P40106; SEQ ID NO: 403) (Pahlman et al. (2001) J. Biol. Chem. 276(5):3555-63; Norbeck et al. (1996) J. Biol. Chem. 271(23):13875-81). In some embodiments, the host cell or fermenting organism comprises a disruption to GPP1. In some embodiments, the host cell or fermenting organism comprises a disruption to GPP2. In some embodiments, the host cell or fermenting organism comprises a disruption to GPP1 and GPP2.

[0508] In some embodiments, the host cell or fermenting organism comprises a disruption to one or more endogenous genes encoding a glycerol 3-phosphate dehydrogenase (GPD). Saccharomyces cerevisiae has two glycerol 3-phosphate dehydrogenases which encode GPD1 (UniProt No. Q00055; SEQ ID NO: 404) and GPD2 (UniProt No. P41911; SEQ ID NO: 405). In some embodiments, the host cell or fermenting organism comprises a disruption to GPD1. In some embodiments, the host cell or fermenting organism comprises a disruption to GPD2. In some embodiments, the host cell or fermenting organism comprises a disruption to GPD1 and GPD2.

[0509] In some embodiments, the host cell or fermenting organism comprises a disruption to an endogenous gene encoding GPP (e.g., GPP1 and/or GPP2) and/or a GPD (GPD1 and/or GPD2), wherein the host cell or fermenting organism produces a decreased amount of glycerol (e.g., at least 25% less, at least 50% less, at least 60% less, at least 70% less, at least 80% less, or at least 90% less) compared to the cell without the disruption to the endogenous gene encoding the GPP and/or GPD when cultivated under identical conditions.

[0510] Modeling analysis can be used to design gene disruptions that additionally optimize utilization of the pathway. One exemplary computational method for identifying and designing metabolic alterations favoring biosynthesis of a desired product is the OptKnock computational framework, Burgard et al., 2003, Biotechnol. Bioeng. 84: 647-657.

[0511] The host cells and fermenting organisms comprising a gene disruption may be constructed using methods well known in the art, including those methods described herein. A portion of the gene can be disrupted such as the coding region or a control sequence required for expression of the coding region. Such a control sequence of the gene may be a promoter sequence or a functional part thereof, i.e., a part that is sufficient for affecting expression of the gene. For example, a promoter sequence may be inactivated resulting in no expression or a weaker promoter may be substituted for the native promoter sequence to reduce expression of the coding sequence. Other control sequences for possible modification include, but are not limited to, a leader, propeptide sequence, signal sequence, transcription terminator, and transcriptional activator.

[0512] The host cells and fermenting organisms comprising a gene disruption may be constructed by gene deletion techniques to eliminate or reduce expression of the gene. Gene deletion techniques enable the partial or complete removal of the gene thereby eliminating their expression. In such methods, deletion of the gene is accomplished by homologous recombination using a plasmid that has been constructed to contiguously contain the 5′ and 3′ regions flanking the gene.

[0513] The host cells and fermenting organisms comprising a gene disruption may also be constructed by introducing, substituting, and/or removing one or more (e.g., two, several) nucleotides in the gene or a control sequence thereof required for the transcription or translation thereof. For example, nucleotides may be inserted or removed for the introduction of a stop codon, the removal of the start codon, or a frame-shift of the open reading frame. Such a modification may be accomplished by site-directed mutagenesis or PCR generated mutagenesis in accordance with methods known in the art. See, for example, Botstein and Shortle, 1985, Science 229: 4719; Lo et al., 1985, Proc. Natl. Acad. Sci. U.S.A. 81: 2285; Higuchi et al., 1988, Nucleic Acids Res 16: 7351; Shimada, 1996, Meth. Mol. Biol. 57: 157; Ho et al., 1989, Gene 77: 61; Horton et al., 1989, Gene 77: 61; and Sarkar and Sommer, 1990, BioTechniques 8: 404.

[0514] The host cells and fermenting organisms comprising a gene disruption may also be constructed by inserting into the gene a disruptive nucleic acid construct comprising a nucleic acid fragment homologous to the gene that will create a duplication of the region of homology and incorporate construct DNA between the duplicated regions. Such a gene disruption can eliminate gene expression if the inserted construct separates the promoter of the gene from the coding region or interrupts the coding sequence such that a non-functional gene product results. A disrupting construct may be simply a selectable marker gene accompanied by 5′ and 3′ regions homologous to the gene. The selectable marker enables identification of transformants containing the disrupted gene.

[0515] The host cells and fermenting organisms comprising a gene disruption may also be constructed by the process of gene conversion (see, for example, Iglesias and Trautner, 1983, Molecular General Genetics 189: 73-76). For example, in the gene conversion method, a nucleotide sequence corresponding to the gene is mutagenized in vitro to produce a defective nucleotide sequence, which is then transformed into the recombinant strain to produce a defective gene. By homologous recombination, the defective nucleotide sequence replaces the endogenous gene. It may be desirable that the defective nucleotide sequence also comprises a marker for selection of transformants containing the defective gene.

[0516] The host cells and fermenting organisms comprising a gene disruption may be further constructed by random or specific mutagenesis using methods well known in the art, including, but not limited to, chemical mutagenesis (see, for example, Hopwood, The Isolation of Mutants in Methods in Microbiology (J. R. Norris and D. W. Ribbons, eds.) pp. 363-433, Academic Press, New York, 1970). Modification of the gene may be performed by subjecting the parent strain to mutagenesis and screening for mutant strains in which expression of the gene has been reduced or inactivated. The mutagenesis, which may be specific or random, may be performed, for example, by use of a suitable physical or chemical mutagenizing agent, use of a suitable oligonucleotide, or subjecting the DNA sequence to PCR generated mutagenesis. Furthermore, the mutagenesis may be performed by use of any combination of these mutagenizing methods.

[0517] Examples of a physical or chemical mutagenizing agent suitable for the present purpose include ultraviolet (UV) irradiation, hydroxylamine, N-methyl-N′-nitro-N-nitrosoguanidine (MNNG), N-methyl-N′-nitrosogaunidine (NTG) O-methyl hydroxylamine, nitrous acid, ethyl methane sulphonate (EMS), sodium bisulphite, formic acid, and nucleotide analogues. When such agents are used, the mutagenesis is typically performed by incubating the parent strain to be mutagenized in the presence of the mutagenizing agent of choice under suitable conditions, and selecting for mutants exhibiting reduced or no expression of the gene.

[0518] A nucleotide sequence homologous or complementary to a gene described herein may be used from other microbial sources to disrupt the corresponding gene in a recombinant strain of choice.

[0519] In one embodiment, the modification of a gene in the recombinant cell is unmarked with a selectable marker. Removal of the selectable marker gene may be accomplished by culturing the mutants on a counter-selection medium. Where the selectable marker gene contains repeats flanking its 5′ and 3′ ends, the repeats will facilitate the looping out of the selectable marker gene by homologous recombination when the mutant strain is submitted to counter-selection. The selectable marker gene may also be removed by homologous recombination by introducing into the mutant strain a nucleic acid fragment comprising 5′ and 3′ regions of the defective gene, but lacking the selectable marker gene, followed by selecting on the counter-selection medium. By homologous recombination, the defective gene containing the selectable marker gene is replaced with the nucleic acid fragment lacking the selectable marker gene. Other methods known in the art may also be used.

### Active Pentose Fermenation Pathway

[0520] The host cells or fermenting organisms described herein (e.g., yeast cells) may comprise an active pentose fermentation pathway, such as an active xylose fermentation pathway and/or and active arabinose fermentation pathway as described in more detail below. Pentose fermentation pathways and pathway genes and corresponding engineered transformants for fermentation of pentose (e.g., xylose, arabinose) are known in the art.

[0521] Any suitable pentose fermentation pathway gene, endogenous or heterologous, may be used and expressed in sufficient amount to produce an enzyme involved in a selected pentose fermentation pathway. With the complete genome sequence available for now numerous microorganism genomes and a variety of yeast, fungi, plant, and mammalian genomes, the identification of genes encoding the selected pentose fermentation pathway enzymatic activities taught herein is routine and well known in the art for a selected host. For example, suitable homologues, orthologs, paralogs and nonorthologous gene displacements of known genes, and the interchange of genetic alterations between organisms can be identified in related or distant host to a selected host.

[0522] For host cells without a known genome sequence, sequences for genes of interest (either as overexpression candidates or as insertion sites) can typically be obtained using techniques known in the art. Routine experimental design can be employed to test expression of various genes and activity of various enzymes, including genes and enzymes that function in a pentose fermentation pathway. Experiments may be conducted wherein each enzyme is expressed in the cell individually and in blocks of enzymes up to and including preferably all pathway enzymes, to establish which are needed (or desired) for improved pentose fermentation. One illustrative experimental design tests expression of each individual enzyme as well as of each unique pair of enzymes, and further can test expression of all required enzymes, or each unique combination of enzymes. A number of approaches can be taken, as will be appreciated.

[0523] The host cells of the invention can be produced by introducing heterologous polynucleotides encoding one or more of the enzymes participating in an active pentose fermentation pathway, as described below. As one in the art will appreciate, in some instances (e.g., depending on the selection of host) the heterologous expression of every gene shown in the active pentose fermentation may not be required since a host cell may have endogenous enzymatic activity from one or more pathway genes. For example, if a chosen host is deficient in one or more enzymes of an active pentose fermentation pathway, then heterologous polynucleotides for the deficient enzyme(s) are introduced into the host for subsequent expression. Alternatively, if the chosen host exhibits endogenous expression of some pathway genes, but is deficient in others, then an encoding polynucleotide is needed for the deficient enzyme(s) to achieve pentose fermentation. Thus, a recombinant host cell of the invention can be produced by introducing heterologous polynucleotides to obtain the enzyme activities of a desired biosynthetic pathway or a desired biosynthetic pathway can be obtained by introducing one or more heterologous polynucleotides that, together with one or more endogenous enzymes, produces a desired product such as ethanol.

[0524] Depending on the pentose fermentation pathway constituents of a selected recombinant host organism, the host cells of the invention will include at least one heterologous polynucleotide and optionally up to all encoding heterologous polynucleotides for the pentose fermentation pathway. For example, pentose fermentation can be established in a host deficient in a pentose fermentation pathway enzyme through heterologous expression of the corresponding polynucleotide. In a host deficient in all enzymes of a pentose fermentation pathway, heterologous expression of all enzymes in the pathway can be included, although it is understood that all enzymes of a pathway can be expressed even if the host contains at least one of the pathway enzymes.

[0525] The enzymes of the selected active pentose fermentation pathway, and activities thereof, can be detected using methods known in the art or as described herein. These detection methods may include use of specific antibodies, formation of an enzyme product, or disappearance of an enzyme substrate. See, for example, Sambrook et al., Molecular Cloning: A Laboratory Manual, Third Ed., Cold Spring Harbor Laboratory, New York (2001); Ausubel et al., Current Protocols in Molecular Biology, John Wiley and Sons, Baltimore, Md. (1999); and Hanai et al., Appl. Environ. Microbiol. 73:7814-7818 (2007)).

[0526] The active pentose fermentation pathway may be an active xylose fermentation pathway. Exemplary xylose fermentation pathways are known in the art (e.g., WO2003/062430, WO2003/078643, WO2004/067760, WO2006/096130, WO2009/017441, WO2010/059095, WO2011/059329, WO2011/123715, WO2012/113120, WO2012/135110, WO2013/081700, WO2018/112638 and US2017/088866). Any xylose fermentation pathway or gene thereof described in the foregoing references is incorporated herein by reference for use in Applicant's active xylose fermentation pathway. FIG. 2 shows conversion of D-xylose to D-xylulose 5-phosphate, which is then fermented to ethanol via the pentose phosphate pathway. The oxido-reductase pathway uses an aldolase reductase (AR, such as xylose reductase (XR)) to reduce D-xylose to xylitol followed by oxidation of xylitol to D-xylulose with xylitol dehydrogenase (XDH; also known as D-xylulose reductase). The isomerase pathway uses xylose isomerase (XI) to convert D-xylose into D-xylulose. D-xylulose is then converted to D-xylulose-5-phosphate with xylulokinase (XK)

[0527] In one embodiment, the host cell or fermenting organism (e.g., yeast cell) further comprises a heterologous polynucleotide encoding a xylose isomerase (XI). The xylose isomerase may be any xylose isomerase that is suitable for the host cells and the methods described herein, such as a naturally occurring xylose isomerase or a variant thereof that retains xylose isomerase activity. In one embodiment, the xylose isomerase is present in the cytosol of the host cells.

[0528] In some embodiments, the host cell or fermenting organism comprising a heterologous polynucleotide encoding a xylose isomerase has an increased level of xylose isomerase activity compared to the host cells without the heterologous polynucleotide encoding the xylose isomerase, when cultivated under the same conditions. In some embodiments, the host cells or fermenting organisms have an increased level of xylose isomerase activity of at least 5%, e.g., at least 10%, at least 15%, at least 20%, at least 25%, at least 50%, at least 100%, at least 150%, at least 200%, at least 300%, or at 500% compared to the host cells without the heterologous polynucleotide encoding the xylose isomerase, when cultivated under the same conditions.

[0529] Exemplary xylose isomerases that can be used with the recombinant host cells and methods of use described herein include, but are not limited to, XIs from the fungus Piromyces sp. (WO2003/062430) or other sources (Madhavan et al., 2009, Appl Microbiol Biotechnol. 82(6), 1067-1078) have been expressed in S. cerevisiae host cells. Still other XIs suitable for expression in yeast have been described in US 2012/0184020 (an XI from Ruminococcus flavefaciens), WO2011/078262 (several XIs from Reticulitermes speratus and Mastotermes darwiniensis) and WO2012/009272 (constructs and fungal cells containing an XI from Abiotrophia defectiva). U.S. Pat. No. 8,586,336 describes a S. cerevisiae host cell expressing an XI obtained by bovine rumen fluid (shown herein as SEQ ID NO: 74).

[0530] Additional polynucleotides encoding suitable xylose isomerases may be obtained from microorganisms of any genus, including those readily available within the UniProtKB database (www.uniprot.org). In one embodiment, the xylose isomerases is a bacterial, a yeast, or a filamentous fungal xylose isomerase, e.g., obtained from any of the microorganisms described or referenced herein, as described supra.

[0531] The xylose isomerase coding sequences can also be used to design nucleic acid probes to identify and clone DNA encoding xylose isomerases from strains of different genera or species, as described supra.

[0532] The polynucleotides encoding xylose isomerases may also be identified and obtained from other sources including microorganisms isolated from nature (e.g., soil, composts, water, etc.) or DNA samples obtained directly from natural materials (e.g., soil, composts, water, etc.) as described supra.

[0533] Techniques used to isolate or clone polynucleotides encoding xylose isomerases are described supra.

[0534] In one embodiment, the xylose isomerase has a mature polypeptide sequence of having at least 60%, e.g., at least 65%, at least 70%, at least 75%, at least 80%, at least 85%, at least 90%, at least 91%, at least 92%, at least 93%, at least 94%, at least 95%, at least 96%, at least 97%, at least 98%, at least 99%, or 100% sequence identity to any xylose isomerase described or referenced herein (e.g., the xylose isomerase of SEQ ID NO: 74). In one embodiment, the xylose isomerase has a mature polypeptide sequence that differs by no more than ten amino acids, e.g., by no more than five amino acids, by no more than four amino acids, by no more than three amino acids, by no more than two amino acids, or by one amino acid from any xylose isomerase described or referenced herein (e.g., the xylose isomerase of SEQ ID NO: 74). In one embodiment, the xylose isomerase has a mature polypeptide sequence that comprises or consists of the amino acid sequence of any xylose isomerase described or referenced herein (e.g., the xylose isomerase of SEQ ID NO: 74), allelic variant, or a fragment thereof having xylose isomerase activity. In one embodiment, the xylose isomerase has an amino acid substitution, deletion, and/or insertion of one or more (e.g., two, several) amino acids. In some embodiments, the total number of amino acid substitutions, deletions and/or insertions is not more than 10, e.g., not more than 9, 8, 7, 6, 5, 4, 3, 2, or 1.

[0535] In some embodiments, the xylose isomerase has at least 20%, e.g., at least 40%, at least 50%, at least 60%, at least 70%, at least 80%, at least 90%, at least 95%, at least 96%, at least 97%, at least 98%, at least 99%, or 100% of the xylose isomerase activity of any xylose isomerase described or referenced herein (e.g., the xylose isomerase of SEQ ID NO: 74) under the same conditions.

[0536] In one embodiment, the xylose isomerase coding sequence hybridizes under at least low stringency conditions, e.g., medium stringency conditions, medium-high stringency conditions, high stringency conditions, or very high stringency conditions with the full-length complementary strand of the coding sequence from any xylose isomerase described or referenced herein (e.g., the xylose isomerase of SEQ ID NO: 74). In one embodiment, the xylose isomerase coding sequence has at least 65%, e.g., at least 70%, at least 75%, at least 80%, at least 85%, at least 85%, at least 90%, at least 91%, at least 92%, at least 93%, at least 94%, at least 95%, at least 96%, at least 97%, at least 98%, at least 99%, or 100% sequence identity with the coding sequence from any xylose isomerase described or referenced herein (e.g., the xylose isomerase of SEQ ID NO: 74).

[0537] In one embodiment, the heterologous polynucleotide encoding the xylose isomerase comprises the coding sequence of any xylose isomerase described or referenced herein (e.g., the xylose isomerase of SEQ ID NO: 74). In one embodiment, the heterologous polynucleotide encoding the xylose isomerase comprises a subsequence of the coding sequence from any xylose isomerase described or referenced herein, wherein the subsequence encodes a polypeptide having xylose isomerase activity. In one embodiment, the number of nucleotides residues in the subsequence is at least 75%, e.g., at least 80%, 85%, 90%, or 95% of the number of the referenced coding sequence.

[0538] The xylose isomerases can also include fused polypeptides or cleavable fusion polypeptides, as described supra.

[0539] The host cell or fermenting organism may also comprise an aldose reductase (AR), xylitol dehydrogenase (XDH) and/or xylulokinase (XK) as described below.

[0540] In one embodiment, the host cell or fermenting organism (e.g., yeast cell) further comprises a heterologous polynucleotide encoding a ribulose 5 phosphate 3-epimerase (RPE1). A ribulose 5 phosphate 3-epimerase, as used herein, provides enzymatic activity for converting L-ribulose 5-phosphate to L-xylulose 5-phosphate (EC 5.1.3.22). The RPE1 may be any RPE1 that is suitable for the host cells and the methods described herein, such as a naturally occurring RPE1 or a variant thereof that retains RPE1 activity. In one embodiment, the RPE1 is present in the cytosol of the host cells.

[0541] In one embodiment, the recombinant cell comprises a heterologous polynucleotide encoding a ribulose 5 phosphate 3-epimerase (RPE1), wherein the RPE1 is Saccharomyces cerevisiae RPE1, or an RPE1 having at least 60%, e.g., at least 65%, 70%, 75%, 80%, 85%, 90%, 95%, 97%, 98%, 99%, or 100% sequence identity to a Saccharomyces cerevisiae RPE1.

[0542] In one embodiment, the host cell or fermenting organism (e.g., yeast cell) further comprises a heterologous polynucleotide encoding a ribulose 5 phosphate isomerase (RKI1). A ribulose 5 phosphate isomerase, as used herein, provides enzymatic activity for converting ribose-5-phophate to ribulose 5-phosphate. The RKI1 may be any RKI1 that is suitable for the host cells and the methods described herein, such as a naturally occurring RKI1 or a variant thereof that retains RKI1 activity. In one embodiment, the RKI1 is present in the cytosol of the host cells.

[0543] In one embodiment, the host cell or fermenting organism comprises a heterologous polynucleotide encoding a ribulose 5 phosphate isomerase (RKI1), wherein the RKI1 is a Saccharomyces cerevisiae RKI1, or an RKI1 having a mature polypeptide sequence of at least 60%, e.g., at least 65%, 70%, 75%, 80%, 85%, 90%, 95%, 97%, 98%, 99%, or 100% sequence identity to a Saccharomyces cerevisiae RKI1.

[0544] In one embodiment, the host cell or fermenting organism (e.g., yeast cell) further comprises a heterologous polynucleotide encoding a transketolase (TKL1). The TKL1 may be any TKL1 that is suitable for the host cells and the methods described herein, such as a naturally occurring TKL1 or a variant thereof that retains TKL1 activity. In one embodiment, the TKL1 is present in the cytosol of the host cells.

[0545] In one embodiment, the host cell or fermenting organism comprises a heterologous polynucleotide encoding a transketolase (TKL1), wherein the TKL1 is a Saccharomyces cerevisiae TKL1, or a TKL1 having a mature polypeptide sequence of at least 60%, e.g., at least 65%, 70%, 75%, 80%, 85%, 90%, 95%, 97%, 98%, 99%, or 100% sequence identity to a Saccharomyces cerevisiae TKL1.

[0546] In one embodiment, the host cell or fermenting organism (e.g., yeast cell) further comprises a heterologous polynucleotide encoding a transaldolase (TAL1). The TAL1 may be any TAL1 that is suitable for the host cells and the methods described herein, such as a naturally occurring TAL1 or a variant thereof that retains TAL1 activity. In one embodiment, the TAL1 is present in the cytosol of the host cells.

[0547] In one embodiment, the host cell or fermenting organism comprises a heterologous polynucleotide encoding a transketolase (TAL1), wherein the TAL1 is a Saccharomyces cerevisiae TAL1, or a TAL1 having a mature polypeptide sequence of at least 60%, e.g., at least 65%, 70%, 75%, 80%, 85%, 90%, 95%, 97%, 98%, 99%, or 100% sequence identity to a Saccharomyces cerevisiae TAL1.

[0548] The active pentose fermentation pathway may be an active arabinose fermentation pathway. Exemplary arabinose fermentation pathways are known in the art (e.g., WO2002/066616; WO2003/095627; WO2007/143245; WO2008/041840; WO2009/011591; WO2010/151548; WO2011/003893; WO2011/131674; WO2012/143513; US2012/225464; U.S. Pat. No. 7,977,083). Any arabinose fermentation pathway or gene thereof described in the foregoing references is incorporated herein by reference for use in Applicant's active xylose fermentation pathway. FIG. 1 shows arabinose fermentation pathways from L-arabinose to D-xylulose 5-phosphate, which is then fermented to ethanol via the pentose phosphate pathway. The bacterial pathway utilizes genes L-arabinose isomerase (AI, such as araA), L-ribulokinase (RK, such as araB), and L-ribulose-5-P4-epimerase (R5PE, such as araD) to convert L-arabinose to D-xylulose 5-phosphate. The fungal pathway proceeds using aldose reductase (AR), L-arabinitol 4-dehydrogenase (LAD), L-xylulose reductase (LXR), xylitol dehydrogenase (XDH, also known as D-xylulose reductase) and xylulokinase (XK).

[0549] In one embodiment, the host cell or fermenting organism (e.g., yeast cell) further comprises a heterologous polynucleotide encoding a L-xylulose reductase (LXR). As shown in FIG. 1, L-xylulose reductase (LXR) is an enzyme used in a “fungal pathway” that proceeds from L-arabinose to D-xyluluose-5-phosphate, where the L-xylulose reductase provides enzymatic activity for converting L-xylulose to xylitol. The L-xylulose reductase may be any L-xylulose reductase that is suitable for the host cells and the methods described herein, such as a naturally occurring L-xylulose reductase or a variant thereof that retains L-xylulose reductase activity. In one embodiment, the L-xylulose reductase is present in the cytosol of the host cells.

[0550] In some embodiments, the host cells or fermenting organisms comprising a heterologous polynucleotide encoding an L-xylulose reductase (LXR) have an increased level of L-xylulose reductase activity compared to the host cells without the heterologous polynucleotide encoding the L-xylulose reductase, when cultivated under the same conditions. In some embodiments, the host cells have an increased level of L-xylulose reductase activity of at least 5%, e.g., at least 10%, at least 15%, at least 20%, at least 25%, at least 50%, at least 100%, at least 150%, at least 200%, at least 300%, or at 500% compared to the host cells without the heterologous polynucleotide encoding the L-xylulose reductase, when cultivated under the same conditions.

[0551] Exemplary L-xylulose reductases (LXRs) that can be used with the host cells and fermenting organisms, and methods of use described herein include, but are not limited to, any one of the L-xylulose reductases of SEQ ID NOs: 454-465, as described in U.S. Provisional Application No. 63/024,010, filed May 13, 2020 (the content of which is hereby incorporated by reference), such as the A. brasiliensis L-xylulose reductase of SEQ ID NO: 454, the T. leycettanus L-xylulose reductase of SEQ ID NO: 457, the A. aculeatus L-xylulose reductase of SEQ ID NO: 459 and the A. niger L-xylulose reductase of SEQ ID NO: 461. Additional polynucleotides encoding suitable L-xylulose reductases may be obtained from microorganisms of any genus, including those readily available within the UniProtKB database (www.uniprot.org). In one embodiment, the L-xylulose reductase is a bacterial, a yeast, or a filamentous fungal L-xylulose reductase, e.g., obtained from any of the microorganisms described or referenced herein, as described supra.

[0552] The L-xylulose reductase (LXR) coding sequences can also be used to design nucleic acid probes to identify and clone DNA encoding L-xylulose reductases from strains of different genera or species, as described supra.

[0553] The polynucleotides encoding the L-xylulose reductases (LXRs) may also be identified and obtained from other sources including microorganisms isolated from nature (e.g., soil, composts, water, etc.) or DNA samples obtained directly from natural materials (e.g., soil, composts, water, etc.) as described supra.

[0554] Techniques used to isolate or clone polynucleotides encoding L-xylulose reductases (LXRs) are described supra.

[0555] In one embodiment, the L-xylulose reductase (LXR) has a mature polypeptide sequence of at least 60%, e.g., at least 65%, at least 70%, at least 75%, at least 80%, at least 85%, at least 90%, at least 91%, at least 92%, at least 93%, at least 94%, at least 95%, at least 96%, at least 97%, at least 98%, at least 99%, or 100% sequence identity to any L-xylulose reductase described or referenced herein (e.g., any one of L-xylulose reductases of SEQ ID NOs: 454-465, such as the L-xylulose reductase of SEQ ID NO: 454, 457, 459 or 461). In one embodiment, the L-xylulose reductase has a mature polypeptide sequence that differs by no more than ten amino acids, e.g., by no more than five amino acids, by no more than four amino acids, by no more than three amino acids, by no more than two amino acids, or by one amino acid from any L-xylulose reductase described or referenced herein (e.g., any one of L-xylulose reductases of SEQ ID NOs: 454-465, such as the L-xylulose reductase of SEQ ID NO: 454, 457, 459 or 461). In one embodiment, the L-xylulose reductase has a mature polypeptide sequence that comprises or consists of the amino acid sequence of any L-xylulose reductase described or referenced herein (e.g., any one of L-xylulose reductases of SEQ ID NOs: 454-465, such as the L-xylulose reductase of SEQ ID NO: 454, 457, 459 or 461), allelic variant, or a fragment thereof having L-xylulose reductase activity. In one embodiment, the L-xylulose reductase has an amino acid substitution, deletion, and/or insertion of one or more (e.g., two, several) amino acids. In some embodiments, the total number of amino acid substitutions, deletions and/or insertions is not more than 10, e.g., not more than 9, 8, 7, 6, 5, 4, 3, 2, or 1.

[0556] In some embodiments, the L-xylulose reductase (LXR) has at least 20%, e.g., at least 40%, at least 50%, at least 60%, at least 70%, at least 80%, at least 90%, at least 95%, at least 96%, at least 97%, at least 98%, at least 99%, or 100% of the L-xylulose reductase activity of any L-xylulose reductase described or referenced herein (e.g., any one of L-xylulose reductases of SEQ ID NOs: 454-465, such as the L-xylulose reductase of SEQ ID NO: 454, 457, 459 or 461) under the same conditions.

[0557] In one embodiment, the L-xylulose reductase (LXR) coding sequence hybridizes under at least low stringency conditions, e.g., medium stringency conditions, medium-high stringency conditions, high stringency conditions, or very high stringency conditions with the full-length complementary strand of the coding sequence from any L-xylulose reductase described or referenced herein (e.g., any one of L-xylulose reductases of SEQ ID NOs: 454-465, such as the L-xylulose reductase of SEQ ID NO: 454, 457, 459 or 461). In one embodiment, the L-xylulose reductase coding sequence has at least 65%, e.g., at least 70%, at least 75%, at least 80%, at least 85%, at least 85%, at least 90%, at least 91%, at least 92%, at least 93%, at least 94%, at least 95%, at least 96%, at least 97%, at least 98%, at least 99%, or 100% sequence identity with the coding sequence from any L-xylulose reductase described or referenced herein (e.g., any one of L-xylulose reductases of SEQ ID NOs: 454-465, such as the L-xylulose reductase of SEQ ID NO: 454, 457, 459 or 461).

[0558] In one embodiment, the heterologous polynucleotide encoding the L-xylulose reductase (LXR) comprises the coding sequence of any L-xylulose reductase described or referenced herein (e.g., any one of L-xylulose reductases of SEQ ID NOs: 454-465, such as the L-xylulose reductase of SEQ ID NO: 454, 457, 459 or 461). In one embodiment, the heterologous polynucleotide encoding the L-xylulose reductase comprises a subsequence of the coding sequence from any L-xylulose reductase described or referenced herein, wherein the subsequence encodes a polypeptide having L-xylulose reductase activity. In one embodiment, the number of nucleotides residues in the subsequence is at least 75%, e.g., at least 80%, 85%, 90%, or 95% of the number of the referenced coding sequence.

[0559] The L-xylulose reductases (LXRs) can also include fused polypeptides or cleavable fusion polypeptides, as described supra.

[0560] In one embodiment, the host cell or fermenting organism (e.g., yeast cell) further comprises a heterologous polynucleotide encoding an aldose reductase (AR). An aldose reductase, as used herein, provides enzymatic activity for converting L-arabinose to L-arabitol, and may also have enzymatic activity for converting D-xylose to xylitol (known as a xylose reductase, XR). The aldose reductase may be any aldose reductase that is suitable for the host cells and the methods described herein, such as a naturally occurring aldose reductase or a variant thereof that retains aldose reductase activity. In one embodiment, the aldose reductase is present in the cytosol of the host cells.

[0561] In some embodiments, the host cells or fermenting organisms comprising a heterologous polynucleotide encoding an aldose reductase (AR) have an increased level of aldose reductase activity compared to the host cells without the heterologous polynucleotide encoding the aldose reductase, when cultivated under the same conditions. In some embodiments, the host cells have an increased level of aldose reductase activity of at least 5%, e.g., at least 10%, at least 15%, at least 20%, at least 25%, at least 50%, at least 100%, at least 150%, at least 200%, at least 300%, or at 500% compared to the host cells without the heterologous polynucleotide encoding the aldose reductase, when cultivated under the same conditions.

[0562] Exemplary aldose reductases (ARs) that can be used with the host cells and fermenting organisms, and methods of use described herein include, but are not limited to, the Aspergillus niger aldose reductase of SEQ ID NO: 438, the Aspergillus oryzae aldose reductase of SEQ ID NO: 439, the Magnaporthe oryzae aldose reductase of SEQ ID NO: 440, the Meyerozyma guilliermondii aldose reductase of SEQ ID NO: 441 and the Scheffersomyces stipitis aldose reductase of SEQ ID NO: 442. Additional polynucleotides encoding suitable aldose reductase may be obtained from microorganisms of any genus, including those readily available within the UniProtKB database (www.uniprot.org). In one embodiment, the aldose reductase is a bacterial, a yeast, or a filamentous fungal aldose reductase, e.g., obtained from any of the microorganisms described or referenced herein, as described supra.

[0563] The aldose reductase (AR) coding sequences can also be used to design nucleic acid probes to identify and clone DNA encoding aldose reductases from strains of different genera or species, as described supra.

[0564] The polynucleotides encoding the aldose reductases (ARs) may also be identified and obtained from other sources including microorganisms isolated from nature (e.g., soil, composts, water, etc.) or DNA samples obtained directly from natural materials (e.g., soil, composts, water, etc.) as described supra.

[0565] Techniques used to isolate or clone polynucleotides encoding aldose reductases (ARs) are described supra.

[0566] In one embodiment, the aldose reductase (AR) has a mature polypeptide sequence of at least 60%, e.g., at least 65%, at least 70%, at least 75%, at least 80%, at least 85%, at least 90%, at least 91%, at least 92%, at least 93%, at least 94%, at least 95%, at least 96%, at least 97%, at least 98%, at least 99%, or 100% sequence identity to any aldose reductase described or referenced herein (e.g., the aldose reductase of SEQ ID NO: 438, 439, 440, 441 or 442). In one embodiment, the aldose reductase has a mature polypeptide sequence that differs by no more than ten amino acids, e.g., by no more than five amino acids, by no more than four amino acids, by no more than three amino acids, by no more than two amino acids, or by one amino acid from any aldose reductase described or referenced herein (e.g., the aldose reductase of SEQ ID NO: 438, 439, 440, 441 or 442). In one embodiment, the aldose reductase has a mature polypeptide sequence that comprises or consists of the amino acid sequence of any aldose reductase described or referenced herein (e.g., the aldose reductase of SEQ ID NO: 438, 439, 440, 441 or 442), allelic variant, or a fragment thereof having aldose reductase activity. In one embodiment, the aldose reductase has an amino acid substitution, deletion, and/or insertion of one or more (e.g., two, several) amino acids. In some embodiments, the total number of amino acid substitutions, deletions and/or insertions is not more than 10, e.g., not more than 9, 8, 7, 6, 5, 4, 3, 2, or 1.

[0567] In some embodiments, the aldose reductase (AR) has at least 20%, e.g., at least 40%, at least 50%, at least 60%, at least 70%, at least 80%, at least 90%, at least 95%, at least 96%, at least 97%, at least 98%, at least 99%, or 100% of the aldose reductase activity of any aldose reductase described or referenced herein (e.g., the aldose reductase of SEQ ID NO: 438, 439, 440, 441 or 442) under the same conditions.

[0568] In one embodiment, the aldose reductase (AR) coding sequence hybridizes under at least low stringency conditions, e.g., medium stringency conditions, medium-high stringency conditions, high stringency conditions, or very high stringency conditions with the full-length complementary strand of the coding sequence from any aldose reductase described or referenced herein (e.g., the aldose reductase of SEQ ID NO: 438, 439, 440, 441 or 442). In one embodiment, the aldose reductase coding sequence has at least 65%, e.g., at least 70%, at least 75%, at least 80%, at least 85%, at least 85%, at least 90%, at least 91%, at least 92%, at least 93%, at least 94%, at least 95%, at least 96%, at least 97%, at least 98%, at least 99%, or 100% sequence identity with the coding sequence from any aldose reductase described or referenced herein (e.g., the aldose reductase of SEQ ID NO: 438, 439, 440, 441 or 442).

[0569] In one embodiment, the heterologous polynucleotide encoding the aldose reductase (AR) comprises the coding sequence of any aldose reductase described or referenced herein (e.g., the aldose reductase of SEQ ID NO: 438, 439, 440, 441 or 442). In one embodiment, the heterologous polynucleotide encoding the aldose reductase comprises a subsequence of the coding sequence from any aldose reductase described or referenced herein, wherein the subsequence encodes a polypeptide having aldose reductase activity. In one embodiment, the number of nucleotides residues in the subsequence is at least 75%, e.g., at least 80%, 85%, 90%, or 95% of the number of the referenced coding sequence.

[0570] The aldose reductases (ARs) can also include fused polypeptides or cleavable fusion polypeptides, as described supra.

[0571] In one embodiment, the host cell or fermenting organism (e.g., yeast cell) further comprises a heterologous polynucleotide encoding an L-arabinitol 4-dehydrogenase (LAD). A L-arabinitol 4-dehydrogenase, as used herein, provides enzymatic activity for converting L-arabitol to L-xylulose. The L-arabinitol 4-dehydrogenase may be any L-arabinitol 4-dehydrogenase that is suitable for the host cells and the methods described herein, such as a naturally occurring L-arabinitol 4-dehydrogenase or a variant thereof that retains L-arabinitol 4-dehydrogenase activity. In one embodiment, the L-arabinitol 4-dehydrogenase is present in the cytosol of the host cells.

[0572] In some embodiments, the host cells or fermenting organisms comprising a heterologous polynucleotide encoding a L-arabinitol 4-dehydrogenase (LAD) have an increased level of L-arabinitol 4-dehydrogenase activity compared to the host cells without the heterologous polynucleotide encoding the L-arabinitol 4-dehydrogenase, when cultivated under the same conditions. In some embodiments, the host cells have an increased level of L-arabinitol 4-dehydrogenase activity of at least 5%, e.g., at least 10%, at least 15%, at least 20%, at least 25%, at least 50%, at least 100%, at least 150%, at least 200%, at least 300%, or at 500% compared to the host cells without the heterologous polynucleotide encoding the L-arabinitol 4-dehydrogenase, when cultivated under the same conditions.

[0573] Exemplary L-arabinitol 4-dehydrogenases (LADs) that can be used with the host cells and fermenting organisms, and methods of use described herein include, but are not limited to, the Meyerozyma caribbica LAD of SEQ ID NO: 443, the Trichoderma reesei LAD of SEQ ID NO: 444, the Meyerozyma guilliermondii LAD of SEQ ID NO: 445, the Candida arabinofermentans LAD of SEQ ID NO: 446, the Candida carpophila LAD of SEQ ID NO: 447, the Talaromyces emersonii LAD of SEQ ID NO: 448, the Aspergillus oryzae LAD of SEQ ID NO: 449, the Neurospora crassa LAD of SEQ ID NO: 450, the Trichoderma reesei LAD of SEQ ID NO: 451, the Aspergillus niger LAD of SEQ ID NO: 452 and the Penicillium rubens LAD of SEQ ID NO: 453. Additional polynucleotides encoding suitable L-arabinitol 4-dehydrogenases may be obtained from microorganisms of any genus, including those readily available within the UniProtKB database (www.uniprot.org). In one embodiment, the L-arabinitol 4-dehydrogenase is a bacterial, a yeast, or a filamentous fungal L-arabinitol 4-dehydrogenase, e.g., obtained from any of the microorganisms described or referenced herein, as described supra.

[0574] The L-arabinitol 4-dehydrogenase (LAD) coding sequences can also be used to design nucleic acid probes to identify and clone DNA encoding L-arabinitol 4-dehydrogenases from strains of different genera or species, as described supra.

[0575] The polynucleotides encoding L-arabinitol 4-dehydrogenases (LADs) may also be identified and obtained from other sources including microorganisms isolated from nature (e.g., soil, composts, water, etc.) or DNA samples obtained directly from natural materials (e.g., soil, composts, water, etc.) as described supra.

[0576] Techniques used to isolate or clone polynucleotides encoding L-arabinitol 4-dehydrogenases (LADs) are described supra.

[0577] In one embodiment, the L-arabinitol 4-dehydrogenase (LAD) has a mature polypeptide sequence of at least 60%, e.g., at least 65%, at least 70%, at least 75%, at least 80%, at least 85%, at least 90%, at least 91%, at least 92%, at least 93%, at least 94%, at least 95%, at least 96%, at least 97%, at least 98%, at least 99%, or 100% sequence identity to any L-arabinitol 4-dehydrogenase described or referenced herein (e.g., the L-arabinitol 4-dehydrogenase of SEQ ID NO: 443, 444, 445, 446, 447, 448, 449, 450, 451, 452 or 453). In one embodiment, the L-arabinitol 4-dehydrogenase has a mature polypeptide sequence that differs by no more than ten amino acids, e.g., by no more than five amino acids, by no more than four amino acids, by no more than three amino acids, by no more than two amino acids, or by one amino acid from any L-arabinitol 4-dehydrogenase described or referenced herein (e.g., the L-arabinitol 4-dehydrogenase of SEQ ID NO: 443, 444, 445, 446, 447, 448, 449, 450, 451, 452 or 453). In one embodiment, the L-arabinitol 4-dehydrogenase has a mature polypeptide sequence that comprises or consists of the amino acid sequence of any L-arabinitol 4-dehydrogenase described or referenced herein (e.g., the L-arabinitol 4-dehydrogenase of SEQ ID NO: 443, 444, 445, 446, 447, 448, 449, 450, 451, 452 or 453), allelic variant, or a fragment thereof having L-arabinitol 4-dehydrogenase activity. In one embodiment, the L-arabinitol 4-dehydrogenase has an amino acid substitution, deletion, and/or insertion of one or more (e.g., two, several) amino acids. In some embodiments, the total number of amino acid substitutions, deletions and/or insertions is not more than 10, e.g., not more than 9, 8, 7, 6, 5, 4, 3, 2, or 1.

[0578] In some embodiments, the L-arabinitol 4-dehydrogenase (LAD) has at least 20%, e.g., at least 40%, at least 50%, at least 60%, at least 70%, at least 80%, at least 90%, at least 95%, at least 96%, at least 97%, at least 98%, at least 99%, or 100% of the L-arabinitol 4-dehydrogenase activity of any L-arabinitol 4-dehydrogenase described or referenced herein (e.g., the L-arabinitol 4-dehydrogenase of SEQ ID NO: 443, 444, 445, 446, 447, 448, 449, 450, 451, 452 or 453) under the same conditions.

[0579] In one embodiment, the L-arabinitol 4-dehydrogenase (LAD) coding sequence hybridizes under at least low stringency conditions, e.g., medium stringency conditions, medium-high stringency conditions, high stringency conditions, or very high stringency conditions with the full-length complementary strand of the coding sequence from any L-arabinitol 4-dehydrogenase described or referenced herein (e.g., the L-arabinitol 4-dehydrogenase of SEQ ID NO: 443, 444, 445, 446, 447, 448, 449, 450, 451, 452 or 453). In one embodiment, the L-arabinitol 4-dehydrogenase coding sequence has at least 65%, e.g., at least 70%, at least 75%, at least 80%, at least 85%, at least 85%, at least 90%, at least 91%, at least 92%, at least 93%, at least 94%, at least 95%, at least 96%, at least 97%, at least 98%, at least 99%, or 100% sequence identity with the coding sequence from any xylulokinase described or referenced herein (e.g., the L-arabinitol 4-dehydrogenase of SEQ ID NO: 443, 444, 445, 446, 447, 448, 449, 450, 451, 452 or 453).

[0580] In one embodiment, the heterologous polynucleotide encoding the L-arabinitol 4-dehydrogenase (LAD) comprises the coding sequence of any L-arabinitol 4-dehydrogenase described or referenced herein (e.g., the L-arabinitol 4-dehydrogenase of SEQ ID NO: 443, 444, 445, 446, 447, 448, 449, 450, 451, 452 or 453). In one embodiment, the heterologous polynucleotide encoding the L-arabinitol 4-dehydrogenase comprises a subsequence of the coding sequence from any L-arabinitol 4-dehydrogenase described or referenced herein, wherein the subsequence encodes a polypeptide having L-arabinitol 4-dehydrogenase activity. In one embodiment, the number of nucleotides residues in the subsequence is at least 75%, e.g., at least 80%, 85%, 90%, or 95% of the number of the referenced coding sequence.

[0581] The L-arabinitol 4-dehydrogenases (LADs) can also include fused polypeptides or cleavable fusion polypeptides, as described supra.

[0582] In one embodiment, the host cell or fermenting organism (e.g., yeast cell) further comprises a heterologous polynucleotide encoding a xylitol dehydrogenase (XDH). A xylitol dehydrogenase, as used herein, provides enzymatic activity for converting xylitol to D-xylulose. The xylitol dehydrogenase may be any xylitol dehydrogenase that is suitable for the host cells and the methods described herein, such as a naturally occurring xylitol dehydrogenase or a variant thereof that retains xylitol dehydrogenase activity. In one embodiment, the xylitol dehydrogenase is present in the cytosol of the host cells.

[0583] In some embodiments, the host cells or fermenting organisms comprising a heterologous polynucleotide encoding a xylitol dehydrogenase (XDH) have an increased level of xylitol dehydrogenase activity compared to the host cells without the heterologous polynucleotide encoding the xylitol dehydrogenase, when cultivated under the same conditions. In some embodiments, the host cells have an increased level of xylitol dehydrogenase activity of at least 5%, e.g., at least 10%, at least 15%, at least 20%, at least 25%, at least 50%, at least 100%, at least 150%, at least 200%, at least 300%, or at 500% compared to the host cells without the heterologous polynucleotide encoding the xylitol dehydrogenase, when cultivated under the same conditions.

[0584] Exemplary xylitol dehydrogenases (XDHs) that can be used with the host cells and fermenting organisms, and methods of use described herein include, but are not limited to, the Scheffersomyces stipitis xylitol dehydrogenase of SEQ ID NO: 466, the Trichoderma reesei xylitol dehydrogenase (Wang et al., 1998, Chin. J. Biotechnol. 14, 179-185), the Pichia stipitis xylitol dehydrogenase (Karhumaa et al, 2007, Microb Cell Fact. 6, 5), as well as other yeast xylitol dehydrogenases described in the art, such as XDHs from S. cerevisiae (Richard et. al., 1999, FEBS Letters 457, 135-138), C. didensiae, C. intermediae, C. parapsilosis, C. silvanoru, C. tropicalis, Kl. Marxsianus, P. guilliermondii, T. molishiama, Pa. tannophilus, and C. shehatae (Yablochkova et al, 2003, Microbiology 72(4), 414-417). Additional polynucleotides encoding suitable xylitol dehydrogenases may be obtained from microorganisms of any genus, including those readily available within the UniProtKB database (www.uniprot.org). In one embodiment, the xylitol dehydrogenase is a bacterial, a yeast, or a filamentous fungal xylitol dehydrogenase, e.g., obtained from any of the microorganisms described or referenced herein, as described supra.

[0585] The xylitol dehydrogenase (XDH) coding sequences can also be used to design nucleic acid probes to identify and clone DNA encoding xylitol dehydrogenases from strains of different genera or species, as described supra.

[0586] The polynucleotides encoding xylitol dehydrogenases (XDHs) may also be identified and obtained from other sources including microorganisms isolated from nature (e.g., soil, composts, water, etc.) or DNA samples obtained directly from natural materials (e.g., soil, composts, water, etc.) as described supra.

[0587] Techniques used to isolate or clone polynucleotides encoding xylitol dehydrogenases (XDHs) are described supra.

[0588] In one embodiment, the xylitol dehydrogenase (XDH) has a mature polypeptide sequence of at least 60%, e.g., at least 65%, at least 70%, at least 75%, at least 80%, at least 85%, at least 90%, at least 91%, at least 92%, at least 93%, at least 94%, at least 95%, at least 96%, at least 97%, at least 98%, at least 99%, or 100% sequence identity to any xylitol dehydrogenase described or referenced herein (e.g., the Scheffersomyces stipitis xylitol dehydrogenase of SEQ ID NO: 466). In one embodiment, the xylitol dehydrogenase has a mature polypeptide sequence that differs by no more than ten amino acids, e.g., by no more than five amino acids, by no more than four amino acids, by no more than three amino acids, by no more than two amino acids, or by one amino acid from any xylitol dehydrogenase described or referenced herein (e.g., the Scheffersomyces stipitis xylitol dehydrogenase of SEQ ID NO: 466). In one embodiment, the xylitol dehydrogenase has a mature polypeptide sequence that comprises or consists of the amino acid sequence of any xylitol dehydrogenase described or referenced herein (e.g., the Scheffersomyces stipitis xylitol dehydrogenase of SEQ ID NO: 466), allelic variant, or a fragment thereof having xylitol dehydrogenase activity. In one embodiment, the xylitol dehydrogenase has an amino acid substitution, deletion, and/or insertion of one or more (e.g., two, several) amino acids. In some embodiments, the total number of amino acid substitutions, deletions and/or insertions is not more than 10, e.g., not more than 9, 8, 7, 6, 5, 4, 3, 2, or 1.

[0589] In some embodiments, the xylitol dehydrogenase (XDH) has at least 20%, e.g., at least 40%, at least 50%, at least 60%, at least 70%, at least 80%, at least 90%, at least 95%, at least 96%, at least 97%, at least 98%, at least 99%, or 100% of the xylitol dehydrogenase activity of any xylitol dehydrogenase described or referenced herein (e.g., the Scheffersomyces stipitis xylitol dehydrogenase of SEQ ID NO: 466) under the same conditions.

[0590] In one embodiment, the xylitol dehydrogenase (XDH) coding sequence hybridizes under at least low stringency conditions, e.g., medium stringency conditions, medium-high stringency conditions, high stringency conditions, or very high stringency conditions with the full-length complementary strand of the coding sequence from any xylitol dehydrogenase described or referenced herein (e.g., the Scheffersomyces stipitis xylitol dehydrogenase of SEQ ID NO: 466). In one embodiment, the xylitol dehydrogenase coding sequence has at least 65%, e.g., at least 70%, at least 75%, at least 80%, at least 85%, at least 85%, at least 90%, at least 91%, at least 92%, at least 93%, at least 94%, at least 95%, at least 96%, at least 97%, at least 98%, at least 99%, or 100% sequence identity with the coding sequence from any xylitol dehydrogenase described or referenced herein (e.g., the Scheffersomyces stipitis xylitol dehydrogenase of SEQ ID NO: 466).

[0591] In one embodiment, the heterologous polynucleotide encoding the xylitol dehydrogenase (XDH) comprises the coding sequence of any xylitol dehydrogenase described or referenced herein (e.g., the Scheffersomyces stipitis xylitol dehydrogenase of SEQ ID NO: 466). In one embodiment, the heterologous polynucleotide encoding the xylitol dehydrogenase comprises a subsequence of the coding sequence from any xylitol dehydrogenase described or referenced herein, wherein the subsequence encodes a polypeptide having xylitol dehydrogenase activity. In one embodiment, the number of nucleotides residues in the subsequence is at least 75%, e.g., at least 80%, 85%, 90%, or 95% of the number of the referenced coding sequence.

[0592] The xylitol dehydrogenases (XDHs) can also include fused polypeptides or cleavable fusion polypeptides, as described supra.

[0593] In one embodiment, the host cell or fermenting organism (e.g., yeast cell) further comprises a heterologous polynucleotide encoding a xylulokinase (XK). A xylulokinase, as used herein, provides enzymatic activity for converting D-xylulose to xylulose 5-phosphate. The xylulokinase may be any xylulokinase that is suitable for the host cells and the methods described herein, such as a naturally occurring xylulokinase or a variant thereof that retains xylulokinase activity. In one embodiment, the xylulokinase is present in the cytosol of the host cells.

[0594] In some embodiments, the host cells or fermenting organisms comprising a heterologous polynucleotide encoding a xylulokinase (XK) have an increased level of xylulokinase activity compared to the host cells without the heterologous polynucleotide encoding the xylulokinase, when cultivated under the same conditions. In some embodiments, the host cells have an increased level of xylulokinase activity of at least 5%, e.g., at least 10%, at least 15%, at least 20%, at least 25%, at least 50%, at least 100%, at least 150%, at least 200%, at least 300%, or at 500% compared to the host cells without the heterologous polynucleotide encoding the xylulokinase, when cultivated under the same conditions.

[0595] Exemplary xylulokinases (XKs) that can be used with the host cells and fermenting organisms, and methods of use described herein include, but are not limited to, the Saccharomyces cerevisiae xylulokinase of SEQ ID NO: 75, the Scheffersomyces stipitis xylulokinase of SEQ ID NO: 467 and the Aspergillus niger xylulokinase of SEQ ID NO: 468. Additional xylulokinases are known in the art. Additional polynucleotides encoding suitable xylulokinases may be obtained from microorganisms of any genus, including those readily available within the UniProtKB database (www.uniprot.org). In one embodiment, the xylulokinases is a bacterial, a yeast, or a filamentous fungal xylulokinase, e.g., obtained from any of the microorganisms described or referenced herein, as described supra.

[0596] The xylulokinase (XK) coding sequences can also be used to design nucleic acid probes to identify and clone DNA encoding xylulokinases from strains of different genera or species, as described supra.

[0597] The polynucleotides encoding xylulokinases (XK) may also be identified and obtained from other sources including microorganisms isolated from nature (e.g., soil, composts, water, etc.) or DNA samples obtained directly from natural materials (e.g., soil, composts, water, etc.) as described supra.

[0598] Techniques used to isolate or clone polynucleotides encoding xylulokinases (XKs) are described supra.

[0599] In one embodiment, the xylulokinase (XK) has a mature polypeptide sequence of at least 60%, e.g., at least 65%, at least 70%, at least 75%, at least 80%, at least 85%, at least 90%, at least 91%, at least 92%, at least 93%, at least 94%, at least 95%, at least 96%, at least 97%, at least 98%, at least 99%, or 100% sequence identity to any xylulokinase described or referenced herein (e.g., the xylulokinase of SEQ ID NO: 75, 467 or 468). In one embodiment, the xylulokinase has a mature polypeptide sequence that differs by no more than ten amino acids, e.g., by no more than five amino acids, by no more than four amino acids, by no more than three amino acids, by no more than two amino acids, or by one amino acid from any xylulokinase described or referenced herein (e.g., the xylulokinase of SEQ ID NO: 75, 467 or 468). In one embodiment, the xylulokinase has a mature polypeptide sequence that comprises or consists of the amino acid sequence of any xylulokinase described or referenced herein (e.g., the xylulokinase of SEQ ID NO: 75, 467 or 468), allelic variant, or a fragment thereof having xylulokinase activity. In one embodiment, the xylulokinase has an amino acid substitution, deletion, and/or insertion of one or more (e.g., two, several) amino acids. In some embodiments, the total number of amino acid substitutions, deletions and/or insertions is not more than 10, e.g., not more than 9, 8, 7, 6, 5, 4, 3, 2, or 1.

[0600] In some embodiments, the xylulokinase (XK) has at least 20%, e.g., at least 40%, at least 50%, at least 60%, at least 70%, at least 80%, at least 90%, at least 95%, at least 96%, at least 97%, at least 98%, at least 99%, or 100% of the xylulokinase activity of any xylulokinase described or referenced herein (e.g., the xylulokinase of SEQ ID NO: 75, 467 or 468) under the same conditions.

[0601] In one embodiment, the xylulokinase (XK) coding sequence hybridizes under at least low stringency conditions, e.g., medium stringency conditions, medium-high stringency conditions, high stringency conditions, or very high stringency conditions with the full-length complementary strand of the coding sequence from any xylulokinase described or referenced herein (e.g., the xylulokinase of SEQ ID NO: 75, 467 or 468). In one embodiment, the xylulokinase coding sequence has at least 65%, e.g., at least 70%, at least 75%, at least 80%, at least 85%, at least 85%, at least 90%, at least 91%, at least 92%, at least 93%, at least 94%, at least 95%, at least 96%, at least 97%, at least 98%, at least 99%, or 100% sequence identity with the coding sequence from any xylulokinase described or referenced herein (e.g., the xylulokinase of SEQ ID NO: 75, 467 or 468).

[0602] In one embodiment, the heterologous polynucleotide encoding the xylulokinase (XK) comprises the coding sequence of any xylulokinase described or referenced herein (e.g., the xylulokinase of SEQ ID NO: 75, 467 or 468). In one embodiment, the heterologous polynucleotide encoding the xylulokinase comprises a subsequence of the coding sequence from any xylulokinase described or referenced herein, wherein the subsequence encodes a polypeptide having xylulokinase activity. In one embodiment, the number of nucleotides residues in the subsequence is at least 75%, e.g., at least 80%, 85%, 90%, or 95% of the number of the referenced coding sequence.

[0603] The xylulokinases (XKs) can also include fused polypeptides or cleavable fusion polypeptides, as described supra.

[0604] In one aspect, the recombinant cells described herein (e.g., a cell comprising a heterologous polynucleotide encoding a sugar transporter) have improved anaerobic growth on a pentose (e.g., xylose and/or arabinose). In one embodiment, the recombinant cell is capable of higher anaerobic growth rate on a pentose (e.g., xylose and/or arabinose) compared to the same cell without the heterologous polynucleotide encoding a sugar transporter (e.g., under conditions described in Example 2).

[0605] In one aspect, the recombinant cells described herein (e.g., a cell comprising a heterologous polynucleotide encoding a sugar transporter) have improved rate of pentose consumption (e.g., xylose and/or arabinose). In one embodiment, the recombinant cell is capable of higher rate of pentose consumption (e.g., xylose and/or arabinose) compared to the same cell without the heterologous polynucleotide encoding a sugar transporter (e.g., under conditions described in Example 2). In one embodiment, the rate of pentose consumption (e.g., xylose and/or arabinose) is at least 5%, e.g., at least 10%, 15%, 20%, 25%, 30%, 35%, 40%, 45%, 50%, 60%, 75% or 90% higher compared to the same cell without the heterologous polynucleotide encoding a sugar transporter (e.g., under conditions described in Example 2).

[0606] In one aspect, the recombinant cells described herein (e.g., a cell comprising a heterologous polynucleotide encoding a sugar transporter described herein) have higher pentose (e.g., xylose and/or arabinose) consumption. In one embodiment, the recombinant cell is capable of higher pentose (e.g., xylose and/or arabinose) consumption compared to the same cell without the heterologous polynucleotide encoding a hexose transporter at about or after 120 hours fermentation (e.g., under conditions described in Example 2). In one embodiment, the recombinant cell is capable of consuming more than 65%, e.g., at least 70%, 75%, 80%, 85%, 90%, 95% of pentose (e.g., xylose and/or arabinose) in the medium at about or after 120 hours fermentation (e.g., under conditions described in Example 2).

### Methods Using a Starch-Containing Material

[0607] In some embodiments, the methods described herein produce a fermentation product from a starch-containing material. Starch-containing material is well-known in the art, containing two types of homopolysaccharides (amylose and amylopectin) and is linked by alpha-(1-4)-D-glycosidic bonds. Any suitable starch-containing starting material may be used. The starting material is generally selected based on the desired fermentation product, such as ethanol. Examples of starch-containing starting materials include cereal, tubers or grains. Specifically, the starch-containing material may be corn, wheat, barley, rye, milo, sago, cassava, tapioca, sorghum, oat, rice, peas, beans, or sweet potatoes, or mixtures thereof. Contemplated are also waxy and non-waxy types of corn and barley.

[0608] In one embodiment, the starch-containing starting material is corn. In one embodiment, the starch-containing starting material is wheat. In one embodiment, the starch-containing starting material is barley. In one embodiment, the starch-containing starting material is rye. In one embodiment, the starch-containing starting material is milo. In one embodiment, the starch-containing starting material is sago. In one embodiment, the starch-containing starting material is cassava. In one embodiment, the starch-containing starting material is tapioca. In one embodiment, the starch-containing starting material is sorghum. In one embodiment, the starch-containing starting material is rice. In one embodiment, the starch-containing starting material is peas. In one embodiment, the starch-containing starting material is beans. In one embodiment, the starch-containing starting material is sweet potatoes. In one embodiment, the starch-containing starting material is oats.

[0609] The methods using a starch-containing material may include a conventional process (e.g., including a liquefaction step described in more detail below) or a raw starch hydrolysis process. In some embodiments using a starch-containing material, saccharification of the starch-containing material is at a temperature above the initial gelatinization temperature. In some embodiments using a starch-containing material, saccharification of the starch-containing material is at a temperature below the initial gelatinization temperature.

### Liquefaction

[0610] In embodiments using a starch-containing material, the methods may further comprise a liquefaction step carried out by subjecting the starch-containing material at a temperature above the initial gelatinization temperature to an alpha-amylase and optionally a protease and/or a glucoamylase. Other enzymes such as a pullulanase and phytase may also be present and/or added in liquefaction. In some embodiments, the liquefaction step is carried out prior to steps a) and b) of the described methods.

[0611] Liquefaction step may be carried out for 0.5-5 hours, such as 1-3 hours, such as typically about 2 hours.

[0612] The term “initial gelatinization temperature” means the lowest temperature at which gelatinization of the starch-containing material commences. In general, starch heated in water begins to gelatinize between about 50° C. and 75° C.; the exact temperature of gelatinization depends on the specific starch and can readily be determined by the skilled artisan. Thus, the initial gelatinization temperature may vary according to the plant species, to the particular variety of the plant species as well as with the growth conditions. The initial gelatinization temperature of a given starch-containing material may be determined as the temperature at which birefringence is lost in 5% of the starch granules using the method described by Gorinstein and Lii, 1992, Starch/Stärke 44(12): 461-466.

[0613] Liquefaction is typically carried out at a temperature in the range from 70-100° C. In one embodiment, the temperature in liquefaction is between 75-95° C., such as between 75-90° C., between 80-90° C., or between 82-88° C., such as about 85° C.

[0614] A jet-cooking step may be carried out prior to liquefaction in step, for example, at a temperature between 110-145° C., 120-140° C., 125-135° C., or about 130° C. for about 1-15 minutes, for about 3-10 minutes, or about 5 minutes.

[0615] The pH during liquefaction may be between 4 and 7, such as pH 4.5-6.5, pH 5.0-6.5, pH 5.0-6.0, pH 5.2-6.2, or about 5.2, about 5.4, about 5.6, or about 5.8.

[0616] In one embodiment, the process further comprises, prior to liquefaction, the steps of:

[0617] i) reducing the particle size of the starch-containing material, preferably by dry milling;

[0618] ii) forming a slurry comprising the starch-containing material and water.

[0619] The starch-containing starting material, such as whole grains, may be reduced in particle size, e.g., by milling, in order to open up the structure, to increase surface area, and allowing for further processing. Generally, there are two types of processes: wet and dry milling. In dry milling whole kernels are milled and used. Wet milling gives a good separation of germ and meal (starch granules and protein). Wet milling is often applied at locations where the starch hydrolysate is used in production of, e.g., syrups. Both dry milling and wet milling are well known in the art of starch processing. In one embodiment the starch-containing material is subjected to dry milling. In one embodiment, the particle size is reduced to between 0.05 to 3.0 mm, e.g., 0.1-0.5 mm, or so that at least 30%, at least 50%, at least 70%, or at least 90% of the starch-containing material fit through a sieve with a 0.05 to 3.0 mm screen, e.g., 0.1-0.5 mm screen. In another embodiment, at least 50%, e.g., at least 70%, at least 80%, or at least 90% of the starch-containing material fit through a sieve with # 6 screen.

[0620] The aqueous slurry may contain from 10-55 w/w-% dry solids (DS), e.g., 25-45 w/w-% dry solids (DS), or 30-40 w/w-% dry solids (DS) of starch-containing material.

[0621] The alpha-amylase, optionally a protease, and optionally a glucoamylase may initially be added to the aqueous slurry to initiate liquefaction (thinning). In one embodiment, only a portion of the enzymes (e.g., about ⅓) is added to the aqueous slurry, while the rest of the enzymes (e.g., about ⅔) are added during liquefaction step.

[0622] A non-exhaustive list of alpha-amylases used in liquefaction can be found in the “Alpha-Amylases” section. Examples of suitable proteases used in liquefaction include any protease described supra in the “Proteases” section. Examples of suitable glucoamylases used in liquefaction include any glucoamylase found in the “Glucoamylases” section.

### Saccharification and Fermentation of Starch-Containing Material

[0623] In embodiments using a starch-containing material, a glucoamylase may be present and/or added in saccharification step a) and/or fermentation step b) or simultaneous saccharification and fermentation (SSF). The glucoamylase of the saccharification step a) and/or fermentation step b) or simultaneous saccharification and fermentation (SSF) is typically different from the glucoamylase optionally added to any liquefaction step described supra. In one embodiment, the glucoamylase is present and/or added together with a fungal alpha-amylase.

[0624] In some embodiments, the host cell or fermenting organism comprises a heterologous polynucleotide encoding a glucoamylase, for example, as described in WO2017/087330, the content of which is hereby incorporated by reference.

[0625] Examples of glucoamylases can be found in the “Glucoamylases” section.

[0626] When doing sequential saccharification and fermentation, saccharification step a) may be carried out under conditions well-known in the art. For instance, saccharification step a) may last up to from about 24 to about 72 hours. In one embodiment, pre-saccharification is done. Pre-saccharification is typically done for 40-90 minutes at a temperature between 30-65° C., typically about 60° C. Pre-saccharification is, in one embodiment, followed by saccharification during fermentation in simultaneous saccharification and fermentation (SSF). Saccharification is typically carried out at temperatures from 20-75° C., preferably from 40-70° C., typically about 60° C., and typically at a pH between 4 and 5, such as about pH 4.5.

[0627] Fermentation is carried out in a fermentation medium, as known in the art and, e.g., as described herein. The fermentation medium includes the fermentation substrate, that is, the carbohydrate source that is metabolized by the fermenting organism. With the processes described herein, the fermentation medium may comprise nutrients and growth stimulator(s) for the fermenting organism(s). Nutrient and growth stimulators are widely used in the art of fermentation and include nitrogen sources, such as ammonia; urea, vitamins and minerals, or combinations thereof.

[0628] Generally, fermenting organisms such as yeast, including Saccharomyces cerevisiae yeast, require an adequate source of nitrogen for propagation and fermentation. Many sources of supplemental nitrogen, if necessary, can be used and such sources of nitrogen are well known in the art. The nitrogen source may be organic, such as urea, DDGs, wet cake or corn mash, or inorganic, such as ammonia or ammonium hydroxide. In one embodiment, the nitrogen source is urea.

[0629] Fermentation can be carried out under low nitrogen conditions, e.g., when using a protease-expressing yeast. In some embodiments, the fermentation step is conducted with less than 1000 ppm supplemental nitrogen (e.g., urea or ammonium hydroxide), such as less than 750 ppm, less than 500 ppm, less than 400 ppm, less than 300 ppm, less than 250 ppm, less than 200 ppm, less than 150 ppm, less than 100 ppm, less than 75 ppm, less than 50 ppm, less than 25 ppm, or less than 10 ppm, supplemental nitrogen. In some embodiments, the fermentation step is conducted with no supplemental nitrogen.

[0630] Simultaneous saccharification and fermentation (“SSF”) is widely used in industrial scale fermentation product production processes, especially ethanol production processes. When doing SSF the saccharification step a) and the fermentation step b) are carried out simultaneously. There is no holding stage for the saccharification, meaning that a fermenting organism, such as yeast, and enzyme(s), may be added together. However, it is also contemplated to add the fermenting organism and enzyme(s) separately. SSF is typically carried out at a temperature from 25° C. to 40° C., such as from 28° C. to 35° C., such as from 30° C. to 34° C., or about 32° C. In one embodiment, fermentation is ongoing for 6 to 120 hours, in particular 24 to 96 hours. In one embodiment, the pH is between 4-5.

[0631] In one embodiment, a cellulolytic enzyme composition is present and/or added in saccharification, fermentation or simultaneous saccharification and fermentation (SSF). Examples of such cellulolytic enzyme compositions can be found in the “Cellulolytic Enzymes and Compositions” section. The cellulolytic enzyme composition may be present and/or added together with a glucoamylase, such as one disclosed in the “Glucoamylases” section.

### Methods Using a Cellulosic-Containing Material

[0632] In some embodiments, the methods described herein produce a fermentation product from a cellulosic-containing material. The predominant polysaccharide in the primary cell wall of biomass is cellulose, the second most abundant is hemicellulose, and the third is pectin. The secondary cell wall, produced after the cell has stopped growing, also contains polysaccharides and is strengthened by polymeric lignin covalently cross-linked to hemicellulose. Cellulose is a homopolymer of anhydrocellobiose and thus a linear beta-(1-4)-D-glucan, while hemicelluloses include a variety of compounds, such as xylans, xyloglucans, arabinoxylans, and mannans in complex branched structures with a spectrum of substituents. Although generally polymorphous, cellulose is found in plant tissue primarily as an insoluble crystalline matrix of parallel glucan chains. Hemicelluloses usually hydrogen bond to cellulose, as well as to other hemicelluloses, which help stabilize the cell wall matrix.

[0633] Cellulose is generally found, for example, in the stems, leaves, hulls, husks, and cobs of plants or leaves, branches, and wood of trees. The cellulosic-containing material can be, but is not limited to, agricultural residue, herbaceous material (including energy crops), municipal solid waste, pulp and paper mill residue, waste paper, and wood (including forestry residue) (see, for example, Wiselogel et al., 1995, in Handbook on Bioethanol (Charles E. Wyman, editor), pp. 105-118, Taylor & Francis, Washington D.C.; Wyman, 1994, Bioresource Technology 50: 3-16; Lynd, 1990, Applied Biochemistry and Biotechnology 24/25: 695-719; Mosier et al., 1999, Recent Progress in Bioconversion of Lignocellulosics, in Advances in Biochemical Engineering/Biotechnology, T. Scheper, managing editor, Volume 65, pp. 23-40, Springer-Verlag, New York). It is understood herein that the cellulose may be in the form of lignocellulose, a plant cell wall material containing lignin, cellulose, and hemicellulose in a mixed matrix. In one embodiment, the cellulosic-containing material is any biomass material. In another embodiment, the cellulosic-containing material is lignocellulose, which comprises cellulose, hemicelluloses, and lignin.

[0634] In one embodiment, the cellulosic-containing material is agricultural residue, herbaceous material (including energy crops), municipal solid waste, pulp and paper mill residue, waste paper, or wood (including forestry residue).

[0635] In another embodiment, the cellulosic-containing material is arundo, bagasse, bamboo, corn cob, corn fiber, corn stover, miscanthus, rice straw, switchgrass, or wheat straw.

[0636] In another embodiment, the cellulosic-containing material is aspen, eucalyptus, fir, pine, poplar, spruce, or willow.

[0637] In another embodiment, the cellulosic-containing material is algal cellulose, bacterial cellulose, cotton linter, filter paper, microcrystalline cellulose (e.g., AVICEL®), or phosphoric-acid treated cellulose.

[0638] In another embodiment, the cellulosic-containing material is an aquatic biomass. As used herein the term “aquatic biomass” means biomass produced in an aquatic environment by a photosynthesis process. The aquatic biomass can be algae, emergent plants, floating-leaf plants, or submerged plants.

[0639] The cellulosic-containing material may be used as is or may be subjected to pretreatment, using conventional methods known in the art, as described herein. In a preferred embodiment, the cellulosic-containing material is pretreated.

[0640] The methods of using cellulosic-containing material can be accomplished using methods conventional in the art. Moreover, the methods of can be implemented using any conventional biomass processing apparatus configured to carry out the processes.

### Cellulosic Pretreatment

[0641] In one embodiment the cellulosic-containing material is pretreated before saccharification.

[0642] In practicing the processes described herein, any pretreatment process known in the art can be used to disrupt plant cell wall components of the cellulosic-containing material (Chandra et al., 2007, Adv. Biochem. Engin./Biotechnol. 108: 67-93; Galbe and Zacchi, 2007, Adv. Biochem. Engin./Biotechnol. 108: 41-65; Hendriks and Zeeman, 2009, Bioresource Technology 100: 10-18; Mosier et al., 2005, Bioresource Technology 96: 673-686; Taherzadeh and Karimi, 2008, Int. J. Mol. Sci. 9: 1621-1651; Yang and Wyman, 2008, Biofuels Bioproducts and Biorefining-Biofpr. 2: 26-40).

[0643] The cellulosic-containing material can also be subjected to particle size reduction, sieving, pre-soaking, wetting, washing, and/or conditioning prior to pretreatment using methods known in the art.

[0644] Conventional pretreatments include, but are not limited to, steam pretreatment (with or without explosion), dilute acid pretreatment, hot water pretreatment, alkaline pretreatment, lime pretreatment, wet oxidation, wet explosion, ammonia fiber explosion, organosolv pretreatment, and biological pretreatment. Additional pretreatments include ammonia percolation, ultrasound, electroporation, microwave, supercritical CO₂, supercritical H₂O, ozone, ionic liquid, and gamma irradiation pretreatments.

[0645] In a one embodiment, the cellulosic-containing material is pretreated before saccharification (i.e., hydrolysis) and/or fermentation. Pretreatment is preferably performed prior to the hydrolysis. Alternatively, the pretreatment can be carried out simultaneously with enzyme hydrolysis to release fermentable sugars, such as glucose, xylose, and/or cellobiose. In most cases the pretreatment step itself results in some conversion of biomass to fermentable sugars (even in absence of enzymes).

[0646] In one embodiment, the cellulosic-containing material is pretreated with steam. In steam pretreatment, the cellulosic-containing material is heated to disrupt the plant cell wall components, including lignin, hemicellulose, and cellulose to make the cellulose and other fractions, e.g., hemicellulose, accessible to enzymes. The cellulosic-containing material is passed to or through a reaction vessel where steam is injected to increase the temperature to the required temperature and pressure and is retained therein for the desired reaction time. Steam pretreatment is preferably performed at 140-250° C., e.g., 160-200° C. or 170-190° C., where the optimal temperature range depends on optional addition of a chemical catalyst. Residence time for the steam pretreatment is preferably 1-60 minutes, e.g., 1-30 minutes, 1-20 minutes, 3-12 minutes, or 4-10 minutes, where the optimal residence time depends on the temperature and optional addition of a chemical catalyst. Steam pretreatment allows for relatively high solids loadings, so that the cellulosic-containing material is generally only moist during the pretreatment. The steam pretreatment is often combined with an explosive discharge of the material after the pretreatment, which is known as steam explosion, that is, rapid flashing to atmospheric pressure and turbulent flow of the material to increase the accessible surface area by fragmentation (Duff and Murray, 1996, Bioresource Technology 855: 1-33; Galbe and Zacchi, 2002, Appl. Microbiol. Biotechnol. 59: 618-628; U.S. Patent Application No. 2002/0164730). During steam pretreatment, hemicellulose acetyl groups are cleaved and the resulting acid autocatalyzes partial hydrolysis of the hemicellulose to monosaccharides and oligosaccharides. Lignin is removed to only a limited extent.

[0647] In one embodiment, the cellulosic-containing material is subjected to a chemical pretreatment. The term “chemical treatment” refers to any chemical pretreatment that promotes the separation and/or release of cellulose, hemicellulose, and/or lignin. Such a pretreatment can convert crystalline cellulose to amorphous cellulose. Examples of suitable chemical pretreatment processes include, for example, dilute acid pretreatment, lime pretreatment, wet oxidation, ammonia fiber/freeze expansion (AFEX), ammonia percolation (APR), ionic liquid, and organosolv pretreatments.

[0648] A chemical catalyst such as H₂SO₄ or SO₂ (typically 0.3 to 5% w/w) is sometimes added prior to steam pretreatment, which decreases the time and temperature, increases the recovery, and improves enzymatic hydrolysis (Ballesteros et al., 2006, Appl. Biochem. Biotechnol. 129-132: 496-508; Varga et al., 2004, Appl. Biochem. Biotechnol. 113-116: 509-523; Sassner et al., 2006, Enzyme Microb. Technol. 39: 756-762). In dilute acid pretreatment, the cellulosic-containing material is mixed with dilute acid, typically H₂SO₄, and water to form a slurry, heated by steam to the desired temperature, and after a residence time flashed to atmospheric pressure. The dilute acid pretreatment can be performed with a number of reactor designs, e.g., plug-flow reactors, counter-current reactors, or continuous counter-current shrinking bed reactors (Duff and Murray, 1996, Bioresource Technology 855: 1-33; Schell et al., 2004, Bioresource Technology 91: 179-188; Lee et al., 1999, Adv. Biochem. Eng. Biotechnol. 65: 93-115). In a specific embodiment the dilute acid pretreatment of cellulosic-containing material is carried out using 4% w/w sulfuric acid at 180° C. for 5 minutes.

[0649] Several methods of pretreatment under alkaline conditions can also be used. These alkaline pretreatments include, but are not limited to, sodium hydroxide, lime, wet oxidation, ammonia percolation (APR), and ammonia fiber/freeze expansion (AFEX) pretreatment. Lime pretreatment is performed with calcium oxide or calcium hydroxide at temperatures of 85-150° C. and residence times from 1 hour to several days (Wyman et al., 2005, Bioresource Technology 96: 1959-1966; Mosier et al., 2005, Bioresource Technology 96: 673-686). WO 2006/110891, WO 2006/110899, WO 2006/110900, and WO 2006/110901 disclose pretreatment methods using ammonia.

[0650] Wet oxidation is a thermal pretreatment performed typically at 180-200° C. for 5-15 minutes with addition of an oxidative agent such as hydrogen peroxide or over-pressure of oxygen (Schmidt and Thomsen, 1998, Bioresource Technology 64: 139-151; Palonen et al., 2004, Appl. Biochem. Biotechnol. 117: 1-17; Varga et al., 2004, Biotechnol. Bioeng. 88: 567-574; Martin et al., 2006, J. Chem. Technol. Biotechnol. 81: 1669-1677). The pretreatment is performed preferably at 1-40% dry matter, e.g., 2-30% dry matter or 5-20% dry matter, and often the initial pH is increased by the addition of alkali such as sodium carbonate.

[0651] A modification of the wet oxidation pretreatment method, known as wet explosion (combination of wet oxidation and steam explosion) can handle dry matter up to 30%. In wet explosion, the oxidizing agent is introduced during pretreatment after a certain residence time. The pretreatment is then ended by flashing to atmospheric pressure (WO 2006/032282).

[0652] Ammonia fiber expansion (AFEX) involves treating the cellulosic-containing material with liquid or gaseous ammonia at moderate temperatures such as 90-150° C. and high pressure such as 17-20 bar for 5-10 minutes, where the dry matter content can be as high as 60% (Gollapalli et al., 2002, Appl. Biochem. Biotechnol. 98: 23-35; Chundawat et al., 2007, Biotechnol. Bioeng. 96: 219-231; Alizadeh et al., 2005, Appl. Biochem. Biotechnol. 121: 1133-1141; Teymouri et al., 2005, Bioresource Technology 96: 2014-2018). During AFEX pretreatment cellulose and hemicelluloses remain relatively intact. Lignin-carbohydrate complexes are cleaved.

[0653] Organosolv pretreatment delignifies the cellulosic-containing material by extraction using aqueous ethanol (40-60% ethanol) at 160-200° C. for 30-60 minutes (Pan et al., 2005, Biotechnol. Bioeng. 90: 473-481; Pan et al., 2006, Biotechnol. Bioeng. 94: 851-861; Kurabi et al., 2005, Appl. Biochem. Biotechnol. 121: 219-230). Sulphuric acid is usually added as a catalyst. In organosolv pretreatment, the majority of hemicellulose and lignin is removed.

[0654] Other examples of suitable pretreatment methods are described by Schell et al., 2003, Appl. Biochem. Biotechnol. 105-108: 69-85, and Mosier et al., 2005, Bioresource Technology 96: 673-686, and U.S. Published Application 2002/0164730.

[0655] In one embodiment, the chemical pretreatment is carried out as a dilute acid treatment, and more preferably as a continuous dilute acid treatment. The acid is typically sulfuric acid, but other acids can also be used, such as acetic acid, citric acid, nitric acid, phosphoric acid, tartaric acid, succinic acid, hydrogen chloride, or mixtures thereof. Mild acid treatment is conducted in the pH range of preferably 1-5, e.g., 1-4 or 1-2.5. In one embodiment, the acid concentration is in the range from preferably 0.01 to 10 wt. % acid, e.g., 0.05 to 5 wt. % acid or 0.1 to 2 wt. % acid. The acid is contacted with the cellulosic-containing material and held at a temperature in the range of preferably 140-200° C., e.g., 165-190° C., for periods ranging from 1 to 60 minutes.

[0656] In another embodiment, pretreatment takes place in an aqueous slurry. In preferred embodiments, the cellulosic-containing material is present during pretreatment in amounts preferably between 10-80 wt. %, e.g., 20-70 wt. % or 30-60 wt. %, such as around 40 wt. %. The pretreated cellulosic-containing material can be unwashed or washed using any method known in the art, e.g., washed with water.

[0657] In one embodiment, the cellulosic-containing material is subjected to mechanical or physical pretreatment. The term “mechanical pretreatment” or “physical pretreatment” refers to any pretreatment that promotes size reduction of particles. For example, such pretreatment can involve various types of grinding or milling (e.g., dry milling, wet milling, or vibratory ball milling).

[0658] The cellulosic-containing material can be pretreated both physically (mechanically) and chemically. Mechanical or physical pretreatment can be coupled with steaming/steam explosion, hydrothermolysis, dilute or mild acid treatment, high temperature, high pressure treatment, irradiation (e.g., microwave irradiation), or combinations thereof. In one embodiment, high pressure means pressure in the range of preferably about 100 to about 400 psi, e.g., about 150 to about 250 psi. In another embodiment, high temperature means temperature in the range of about 100 to about 300° C., e.g., about 140 to about 200° C. In a preferred embodiment, mechanical or physical pretreatment is performed in a batch-process using a steam gun hydrolyzer system that uses high pressure and high temperature as defined above, e.g., a Sunds Hydrolyzer available from Sunds Defibrator AB, Sweden. The physical and chemical pretreatments can be carried out sequentially or simultaneously, as desired.

[0659] Accordingly, in one embodiment, the cellulosic-containing material is subjected to physical (mechanical) or chemical pretreatment, or any combination thereof, to promote the separation and/or release of cellulose, hemicellulose, and/or lignin.

[0660] In one embodiment, the cellulosic-containing material is subjected to a biological pretreatment. The term “biological pretreatment” refers to any biological pretreatment that promotes the separation and/or release of cellulose, hemicellulose, and/or lignin from the cellulosic-containing material. Biological pretreatment techniques can involve applying lignin-solubilizing microorganisms and/or enzymes (see, for example, Hsu, T.-A., 1996, Pretreatment of biomass, in Handbook on Bioethanol: Production and Utilization, Wyman, C. E., ed., Taylor & Francis, Washington, D.C., 179-212; Ghosh and Singh, 1993, Adv. Appl. Microbiol. 39: 295-333; McMillan, J. D., 1994, Pretreating lignocellulosic biomass: a review, in Enzymatic Conversion of Biomass for Fuels Production, Himmel, M. E., Baker, J. O., and Overend, R. P., eds., ACS Symposium Series 566, American Chemical Society, Washington, D.C., chapter 15; Gong, C. S., Cao, N. J., Du, J., and Tsao, G. T., 1999, Ethanol production from renewable resources, in Advances in Biochemical Engineering/Biotechnology, Scheper, T., ed., Springer-Verlag Berlin Heidelberg, Germany, 65: 207-241; Olsson and Hahn-Hagerdal, 1996, Enz. Microb. Tech. 18: 312-331; and Vallander and Eriksson, 1990, Adv. Biochem. Eng./Biotechnol. 42: 63-95).

### Saccharification and Fermentation of Cellulosic-Containing Material

[0661] Saccharification (i.e., hydrolysis) and fermentation, separate or simultaneous, include, but are not limited to, separate hydrolysis and fermentation (SHF); simultaneous saccharification and fermentation (SSF); simultaneous saccharification and co-fermentation (SSCF); hybrid hydrolysis and fermentation (HHF); separate hydrolysis and co-fermentation (SHCF); hybrid hydrolysis and co-fermentation (HHCF).

[0662] SHF uses separate process steps to first enzymatically hydrolyze the cellulosic-containing material to fermentable sugars, e.g., glucose, cellobiose, and pentose monomers, and then ferment the fermentable sugars to ethanol. In SSF, the enzymatic hydrolysis of the cellulosic-containing material and the fermentation of sugars to ethanol are combined in one step (Philippidis, G. P., 1996, Cellulose bioconversion technology, in Handbook on Bioethanol: Production and Utilization, Wyman, C. E., ed., Taylor & Francis, Washington, D.C., 179-212). SSCF involves the co-fermentation of multiple sugars (Sheehan and Himmel, 1999, Biotechnol. Prog. 15: 817-827). HHF involves a separate hydrolysis step, and in addition a simultaneous saccharification and hydrolysis step, which can be carried out in the same reactor. The steps in an HHF process can be carried out at different temperatures, i.e., high temperature enzymatic saccharification followed by SSF at a lower temperature that the fermentation organismcan tolerate. It is understood herein that any method known in the art comprising pretreatment, enzymatic hydrolysis (saccharification), fermentation, or a combination thereof, can be used in the practicing the processes described herein.

[0663] A conventional apparatus can include a fed-batch stirred reactor, a batch stirred reactor, a continuous flow stirred reactor with ultrafiltration, and/or a continuous plug-flow column reactor (de Castilhos Corazza et al., 2003, Acta Scientiarum. Technology 25: 33-38; Gusakov and Sinitsyn, 1985, Enz. Microb. Technol. 7: 346-352), an attrition reactor (Ryu and Lee, 1983, Biotechnol. Bioeng. 25: 53-65). Additional reactor types include fluidized bed, upflow blanket, immobilized, and extruder type reactors for hydrolysis and/or fermentation.

[0664] In the saccharification step (i.e., hydrolysis step), the cellulosic and/or starch-containing material, e.g., pretreated, is hydrolyzed to break down cellulose, hemicellulose, and/or starch to fermentable sugars, such as glucose, cellobiose, xylose, xylulose, arabinose, mannose, galactose, and/or soluble oligosaccharides. The hydrolysis is performed enzymatically e.g., by a cellulolytic enzyme composition. The enzymes of the compositions can be added simultaneously or sequentially.

[0665] Enzymatic hydrolysis may be carried out in a suitable aqueous environment under conditions that can be readily determined by one skilled in the art. In one embodiment, hydrolysis is performed under conditions suitable for the activity of the enzymes(s), i.e., optimal for the enzyme(s). The hydrolysis can be carried out as a fed batch or continuous process where the cellulosic and/or starch-containing material is fed gradually to, for example, an enzyme containing hydrolysis solution.

[0666] The saccharification is generally performed in stirred-tank reactors or fermentors under controlled pH, temperature, and mixing conditions. Suitable process time, temperature and pH conditions can readily be determined by one skilled in the art. For example, the saccharification can last up to 200 hours, but is typically performed for preferably about 12 to about 120 hours, e.g., about 16 to about 72 hours or about 24 to about 48 hours. The temperature is in the range of preferably about 25° C. to about 70° C., e.g., about 30° C. to about 65° C., about 40° C. to about 60° C., or about 50° C. to about 55° C. The pH is in the range of preferably about 3 to about 8, e.g., about 3.5 to about 7, about 4 to about 6, or about 4.5 to about 5.5. The dry solids content is in the range of preferably about 5 to about 50 wt. %, e.g., about 10 to about 40 wt. % or about 20 to about 30 wt. %.

[0667] Saccharification in may be carried out using a cellulolytic enzyme composition. Such enzyme compositions are described below in the “Cellulolytic Enzyme Composition’-section below. The cellulolytic enzyme compositions can comprise any protein useful in degrading the cellulosic-containing material. In one embodiment, the cellulolytic enzyme composition comprises or further comprises one or more (e.g., several) proteins selected from the group consisting of a cellulase, an AA9 (GH61) polypeptide, a hemicellulase, an esterase, an expansin, a ligninolytic enzyme, an oxidoreductase, a pectinase, a protease, and a swollenin.

[0668] In another embodiment, the cellulase is preferably one or more (e.g., several) enzymes selected from the group consisting of an endoglucanase, a cellobiohydrolase, and a beta-glucosidase.

[0669] In another embodiment, the hemicellulase is preferably one or more (e.g., several) enzymes selected from the group consisting of an acetylmannan esterase, an acetylxylan esterase, an arabinanase, an arabinofuranosidase, a coumaric acid esterase, a feruloyl esterase, a galactosidase, a glucuronidase, a glucuronoyl esterase, a mannanase, a mannosidase, a xylanase, and a xylosidase. In another embodiment, the oxidoreductase is one or more (e.g., several) enzymes selected from the group consisting of a catalase, a laccase, and a peroxidase. The enzymes or enzyme compositions used in a processes of the present invention may be in any form suitable for use, such as, for example, a fermentation broth formulation or a cell composition, a cell lysate with or without cellular debris, a semi-purified or purified enzyme preparation, or a host cell as a source of the enzymes. The enzyme composition may be a dry powder or granulate, a non-dusting granulate, a liquid, a stabilized liquid, or a stabilized protected enzyme. Liquid enzyme preparations may, for instance, be stabilized by adding stabilizers such as a sugar, a sugar alcohol or another polyol, and/or lactic acid or another organic acid according to established processes.

[0670] In one embodiment, an effective amount of cellulolytic or hemicellulolytic enzyme composition to the cellulosic-containing material is about 0.5 to about 50 mg, e.g., about 0.5 to about 40 mg, about 0.5 to about 25 mg, about 0.75 to about 20 mg, about 0.75 to about 15 mg, about 0.5 to about 10 mg, or about 2.5 to about 10 mg per g of the cellulosic-containing material.

[0671] In one embodiment, such a compound is added at a molar ratio of the compound to glucosyl units of cellulose of about 10⁻⁶ to about 10, e.g., about 10⁻⁶ to about 7.5, about 10⁻⁶ to about 5, about 10⁻⁶ to about 2.5, about 10⁻⁶ to about 1, about 10⁻⁵ to about 1, about 10⁻⁵ to about 10⁻¹, about 10⁻⁴ to about 10⁻¹, about 10⁻³ to about 10⁻¹, or about 10⁻³ to about 10⁻². In another embodiment, an effective amount of such a compound is about 0.1 μM to about 1 M, e.g., about 0.5 μM to about 0.75 M, about 0.75 μM to about 0.5 M, about 1 μM to about 0.25 M, about 1 μM to about 0.1 M, about 5 μM to about 50 mM, about 10 μM to about 25 mM, about 50 μM to about 25 mM, about 10 μM to about 10 mM, about 5 μM to about 5 mM, or about 0.1 mM to about 1 mM.

[0672] The term “liquor” means the solution phase, either aqueous, organic, or a combination thereof, arising from treatment of a lignocellulose and/or hemicellulose material in a slurry, or monosaccharides thereof, e.g., xylose, arabinose, mannose, etc. under conditions as described in WO 2012/021401, and the soluble contents thereof. A liquor for cellulolytic enhancement of an AA9 polypeptide (GH61 polypeptide) can be produced by treating a lignocellulose or hemicellulose material (or feedstock) by applying heat and/or pressure, optionally in the presence of a catalyst, e.g., acid, optionally in the presence of an organic solvent, and optionally in combination with physical disruption of the material, and then separating the solution from the residual solids. Such conditions determine the degree of cellulolytic enhancement obtainable through the combination of liquor and an AA9 polypeptide during hydrolysis of a cellulosic substrate by a cellulolytic enzyme preparation. The liquor can be separated from the treated material using a method standard in the art, such as filtration, sedimentation, or centrifugation.

[0673] In one embodiment, an effective amount of the liquor to cellulose is about 10⁻⁶ to about 10 g per g of cellulose, e.g., about 10⁻⁶ to about 7.5 g, about 10⁻⁶ to about 5 g, about 10⁻⁶ to about 2.5 g, about 10⁻⁶ to about 1 g, about 10⁻⁵ to about 1 g, about 10⁻⁵ to about 10⁻¹ g, about 10⁻⁴ to about 10⁻¹ g, about 10⁻³ to about 10⁻¹ g, or about 10⁻³ to about 10⁻² g per g of cellulose.

[0674] In the fermentation step, sugars, released from the cellulosic-containing material, e.g., as a result of the pretreatment and enzymatic hydrolysis steps, are fermented to ethanol, by a host cell or fermenting organism, such as yeast described herein. Hydrolysis (saccharification) and fermentation can be separate or simultaneous.

[0675] Any suitable hydrolyzed cellulosic-containing material can be used in the fermentation step in practicing the processes described herein. Such feedstocks include, but are not limited to carbohydrates (e.g., lignocellulose, xylans, cellulose, starch, etc.). The material is generally selected based on economics, i.e., costs per equivalent sugar potential, and recalcitrance to enzymatic conversion.

[0676] Production of ethanol by a host cell or fermenting organism using cellulosic-containing material results from the metabolism of sugars (monosaccharides). The sugar composition of the hydrolyzed cellulosic-containing material and the ability of the host cell or fermenting organism to utilize the different sugars has a direct impact in process yields. Prior to Applicant's disclosure herein, strains known in the art utilize glucose efficiently but do not (or very limitedly) metabolize pentoses like xylose, a monosaccharide commonly found in hydrolyzed material.

[0677] Compositions of the fermentation media and fermentation conditions depend on the host cell or fermenting organism and can easily be determined by one skilled in the art. Typically, the fermentation takes place under conditions known to be suitable for generating the fermentation product. In some embodiments, the fermentation process is carried out under aerobic or microaerophilic (i.e., where the concentration of oxygen is less than that in air), or anaerobic conditions. In some embodiments, fermentation is conducted under anaerobic conditions (i.e., no detectable oxygen), or less than about 5, about 2.5, or about 1 mmol/L/h oxygen. In the absence of oxygen, the NADH produced in glycolysis cannot be oxidized by oxidative phosphorylation. Under anaerobic conditions, pyruvate or a derivative thereof may be utilized by the host cell as an electron and hydrogen acceptor in order to generate NAD+.

[0678] The fermentation process is typically run at a temperature that is optimal for the recombinant fungal cell. For example, in some embodiments, the fermentation process is performed at a temperature in the range of from about 25° C. to about 42° C. Typically the process is carried out a temperature that is less than about 38° C., less than about 35° C., less than about 33° C., or less than about 38° C., but at least about 20° C., 22° C., or 25° C.

[0679] A fermentation stimulator can be used in a process described herein to further improve the fermentation, and in particular, the performance of the host cell or fermenting organism, such as, rate enhancement and product yield (e.g., ethanol yield). A “fermentation stimulator” refers to stimulators for growth of the host cells and fermenting organisms, in particular, yeast. Preferred fermentation stimulators for growth include vitamins and minerals. Examples of vitamins include multivitamins, biotin, pantothenate, nicotinic acid, meso-inositol, thiamine, pyridoxine, para-aminobenzoic acid, folic acid, riboflavin, and Vitamins A, B, C, D, and E. See, for example, Alfenore et al., Improving ethanol production and viability of Saccharomyces cerevisiae by a vitamin feeding strategy during fed-batch process, Springer-Verlag (2002), which is hereby incorporated by reference. Examples of minerals include minerals and mineral salts that can supply nutrients comprising P, K, Mg, S, Ca, Fe, Zn, Mn, and Cu.

### Cellulolytic Enzymes and Compositions

[0680] A cellulolytic enzyme or cellulolytic enzyme composition may be present and/or added during saccharification. A cellulolytic enzyme composition is an enzyme preparation containing one or more (e.g., several) enzymes that hydrolyze cellulosic-containing material. Such enzymes include endoglucanase, cellobiohydrolase, beta-glucosidase, and/or combinations thereof.

[0681] In some embodiments, the host cell or fermenting organism comprises one or more (e.g., several) heterologous polynucleotides encoding enzymes that hydrolyze cellulosic-containing material (e.g., an endoglucanase, cellobiohydrolase, beta-glucosidase or combinations thereof). Any enzyme described or referenced herein that hydrolyzes cellulosic-containing material is contemplated for expression in the host cell or fermenting organism.

[0682] The cellulolytic enzyme may be any cellulolytic enzyme that is suitable for the host cells and/or the methods described herein (e.g., an endoglucanase, cellobiohydrolase, beta-glucosidase), such as a naturally occurring cellulolytic enzyme or a variant thereof that retains cellulolytic enzyme activity.

[0683] In some embodiments, the host cell or fermenting organism comprising a heterologous polynucleotide encoding a cellulolytic enzyme has an increased level of cellulolytic enzyme activity (e.g., increased endoglucanase, cellobiohydrolase, and/or beta-glucosidase) compared to the host cells without the heterologous polynucleotide encoding the cellulolytic enzyme, when cultivated under the same conditions. In some embodiments, the host cell or fermenting organism has an increased level of cellulolytic enzyme activity of at least 5%, e.g., at least 10%, at least 15%, at least 20%, at least 25%, at least 50%, at least 100%, at least 150%, at least 200%, at least 300%, or at 500% compared to the host cell or fermenting organism without the heterologous polynucleotide encoding the cellulolytic enzyme, when cultivated under the same conditions.

[0684] Exemplary cellulolytic enzymes that can be used with the host cells and/or the methods described herein include bacterial, yeast, or filamentous fungal cellulolytic enzymes, e.g., obtained from any of the microorganisms described or referenced herein, as described supra under the sections related to proteases.

[0685] The cellulolytic enzyme may be of any origin. In an embodiment the cellulolytic enzyme is derived from a strain of Trichoderma, such as a strain of Trichoderma reesei; a strain of Humicola, such as a strain of Humicola insolens, and/or a strain of Chrysosporium, such as a strain of Chrysosporium lucknowense. In a preferred embodiment the cellulolytic enzyme is derived from a strain of Trichoderma reesei.

[0686] The cellulolytic enzyme composition may further comprise one or more of the following polypeptides, such as enzymes: AA9 polypeptide (GH61 polypeptide) having cellulolytic enhancing activity, beta-glucosidase, xylanase, beta-xylosidase, CBH I, CBH II, or a mixture of two, three, four, five or six thereof.

[0687] The further polypeptide(s) (e.g., AA9 polypeptide) and/or enzyme(s) (e.g., beta-glucosidase, xylanase, beta-xylosidase, CBH I and/or CBH II may be foreign to the cellulolytic enzyme composition producing organism (e.g., Trichoderma reesei).

[0688] In an embodiment the cellulolytic enzyme composition comprises an AA9 polypeptide having cellulolytic enhancing activity and a beta-glucosidase.

[0689] In another embodiment the cellulolytic enzyme composition comprises an AA9 polypeptide having cellulolytic enhancing activity, a beta-glucosidase, and a CBH I.

[0690] In another embodiment the cellulolytic enzyme composition comprises an AA9 polypeptide having cellulolytic enhancing activity, a beta-glucosidase, a CBH I and a CBH II.

[0691] Other enzymes, such as endoglucanases, may also be comprised in the cellulolytic enzyme composition.

[0692] As mentioned above the cellulolytic enzyme composition may comprise a number of difference polypeptides, including enzymes.

[0693] In one embodiment, the cellulolytic enzyme composition is a Trichoderma reesei cellulolytic enzyme composition, further comprising Thermoascus aurantiacus AA9 (GH61A) polypeptide having cellulolytic enhancing activity (e.g., WO 2005/074656), and Aspergillus oryzae beta-glucosidase fusion protein (e.g., one disclosed in WO 2008/057637, in particular shown as SEQ ID NOs: 59 and 60).

[0694] In another embodiment the cellulolytic enzyme composition is a Trichoderma reesei cellulolytic enzyme composition, further comprising Thermoascus aurantiacus AA9 (GH61A) polypeptide having cellulolytic enhancing activity (e.g., SEQ ID NO: 2 in WO 2005/074656), and Aspergillus fumigatus beta-glucosidase (e.g., SEQ ID NO: 2 of WO 2005/047499).

[0695] In another embodiment the cellulolytic enzyme composition is a Trichoderma reesei cellulolytic enzyme composition, further comprising Penicillium emersonii AA9 (GH61A) polypeptide having cellulolytic enhancing activity, in particular the one disclosed in WO 2011/041397, and Aspergillus fumigatus beta-glucosidase (e.g., SEQ ID NO: 2 of WO 2005/047499).

[0696] In another embodiment the cellulolytic enzyme composition is a Trichoderma reesei cellulolytic enzyme composition, further comprising Penicillium emersonii AA9 (GH61A) polypeptide having cellulolytic enhancing activity, in particular the one disclosed in WO 2011/041397, and Aspergillus fumigatus beta-glucosidase (e.g., SEQ ID NO: 2 of WO 2005/047499) or a variant disclosed in WO 2012/044915 (hereby incorporated by reference), in particular one comprising one or more such as all of the following substitutions: F100D, S283G, N456E, F512Y.

[0697] In an embodiment the cellulolytic enzyme composition is a Trichoderma reesei cellulolytic composition, further comprising an AA9 (GH61A) polypeptide having cellulolytic enhancing activity, in particular the one derived from a strain of Penicillium emersonii (e.g., SEQ ID NO: 2 in WO 2011/041397), Aspergillus fumigatus beta-glucosidase (e.g., SEQ ID NO: 2 in WO 2005/047499) variant with one or more, in particular all of the following substitutions: F100D, S283G, N456E, F512Y and disclosed in WO 2012/044915; Aspergillus fumigatus Cel7A CBH1, e.g., the one disclosed as SEQ ID NO: 6 in WO2011/057140 and Aspergillus fumigatus CBH II, e.g., the one disclosed as SEQ ID NO: 18 in WO 2011/057140.

[0698] In a preferred embodiment the cellulolytic enzyme composition is a Trichoderma reesei, cellulolytic enzyme composition, further comprising a hemicellulase or hemicellulolytic enzyme composition, such as an Aspergillus fumigatus xylanase and Aspergillus fumigatus beta-xylosidase.

[0699] In an embodiment the cellulolytic enzyme composition also comprises a xylanase (e.g., derived from a strain of the genus Aspergillus, in particular Aspergillus aculeatus or Aspergillus fumigatus; or a strain of the genus Talaromyces, in particular Talaromyces leycettanus) and/or a beta-xylosidase (e.g., derived from Aspergillus, in particular Aspergillus fumigatus, or a strain of Talaromyces, in particular Talaromyces emersonii).

[0700] In an embodiment the cellulolytic enzyme composition is a Trichoderma reesei cellulolytic enzyme composition, further comprising Thermoascus aurantiacus AA9 (GH61A) polypeptide having cellulolytic enhancing activity (e.g., WO 2005/074656), Aspergillus oryzae beta-glucosidase fusion protein (e.g., one disclosed in WO 2008/057637, in particular as SEQ ID NOs: 59 and 60), and Aspergillus aculeatus xylanase (e.g., Xyl II in WO 94/21785).

[0701] In another embodiment the cellulolytic enzyme composition comprises a Trichoderma reesei cellulolytic preparation, further comprising Thermoascus aurantiacus GH61A polypeptide having cellulolytic enhancing activity (e.g., SEQ ID NO: 2 in WO 2005/074656), Aspergillus fumigatus beta-glucosidase (e.g., SEQ ID NO: 2 of WO 2005/047499) and Aspergillus aculeatus xylanase (Xyl II disclosed in WO 94/21785).

[0702] In another embodiment the cellulolytic enzyme composition comprises a Trichoderma reesei cellulolytic enzyme composition, further comprising Thermoascus aurantiacus AA9 (GH61A) polypeptide having cellulolytic enhancing activity (e.g., SEQ ID NO: 2 in WO 2005/074656), Aspergillus fumigatus beta-glucosidase (e.g., SEQ ID NO: 2 of WO 2005/047499) and Aspergillus aculeatus xylanase (e.g., Xyl II disclosed in WO 94/21785).

[0703] In another embodiment the cellulolytic enzyme composition is a Trichoderma reesei cellulolytic enzyme composition, further comprising Penicillium emersonii AA9 (GH61A) polypeptide having cellulolytic enhancing activity, in particular the one disclosed in WO 2011/041397, Aspergillus fumigatus beta-glucosidase (e.g., SEQ ID NO: 2 of WO 2005/047499) and Aspergillus fumigatus xylanase (e.g., Xyl III in WO 2006/078256).

[0704] In another embodiment the cellulolytic enzyme composition comprises a Trichoderma reesei cellulolytic enzyme composition, further comprising Penicillium emersonii AA9 (GH61A) polypeptide having cellulolytic enhancing activity, in particular the one disclosed in WO 2011/041397, Aspergillus fumigatus beta-glucosidase (e.g., SEQ ID NO: 2 of WO 2005/047499), Aspergillus fumigatus xylanase (e.g., Xyl III in WO 2006/078256), and CBH I from Aspergillus fumigatus, in particular Cel7A CBH1 disclosed as SEQ ID NO: 2 in WO2011/057140.

[0705] In another embodiment the cellulolytic enzyme composition is a Trichoderma reesei cellulolytic enzyme composition, further comprising Penicillium emersonii AA9 (GH61A) polypeptide having cellulolytic enhancing activity, in particular the one disclosed in WO 2011/041397, Aspergillus fumigatus beta-glucosidase (e.g., SEQ ID NO: 2 of WO 2005/047499), Aspergillus fumigatus xylanase (e.g., Xyl III in WO 2006/078256), CBH I from Aspergillus fumigatus, in particular Cel7A CBH1 disclosed as SEQ ID NO: 2 in WO 2011/057140, and CBH II derived from Aspergillus fumigatus in particular the one disclosed as SEQ ID NO: 4 in WO 2013/028928.

[0706] In another embodiment the cellulolytic enzyme composition is a Trichoderma reesei cellulolytic enzyme composition, further comprising Penicillium emersonii AA9 (GH61A) polypeptide having cellulolytic enhancing activity, in particular the one disclosed in WO 2011/041397, Aspergillus fumigatus beta-glucosidase (e.g., SEQ ID NO: 2 of WO 2005/047499) or variant thereof with one or more, in particular all, of the following substitutions: F100D, S283G, N456E, F512Y; Aspergillus fumigatus xylanase (e.g., Xyl III in WO 2006/078256), CBH I from Aspergillus fumigatus, in particular Cel7A CBH I disclosed as SEQ ID NO: 2 in WO 2011/057140, and CBH II derived from Aspergillus fumigatus, in particular the one disclosed in WO 2013/028928.

[0707] In another embodiment the cellulolytic enzyme composition is a Trichoderma reesei cellulolytic enzyme composition comprising the CBH I (GENSEQP Accession No. AZY49536 (WO2012/103293); a CBH II (GENSEQP Accession No. AZY49446 (WO2012/103288); a beta-glucosidase variant (GENSEQP Accession No. AZU67153 (WO 2012/44915)), in particular with one or more, in particular all, of the following substitutions: F100D, S283G, N456E, F512Y; and AA9 (GH61 polypeptide) (GENSEQP Accession No. BAL61510 (WO 2013/028912)).

[0708] In another embodiment the cellulolytic enzyme composition is a Trichoderma reesei cellulolytic enzyme composition comprising a CBH I (GENSEQP Accession No. AZY49536 (WO2012/103293)); a CBH II (GENSEQP Accession No. AZY49446 (WO2012/103288); a GH10 xylanase (GENSEQP Accession No. BAK46118 (WO 2013/019827)); and a beta-xylosidase (GENSEQP Accession No. AZI04896 (WO 2011/057140)).

[0709] In another embodiment the cellulolytic enzyme composition is a Trichoderma reesei cellulolytic enzyme composition comprising a CBH I (GENSEQP Accession No. AZY49536 (WO2012/103293)); a CBH II (GENSEQP Accession No. AZY49446 (WO2012/103288)); and an AA9 (GH61 polypeptide; GENSEQP Accession No. BAL61510 (WO 2013/028912)).

[0710] In another embodiment the cellulolytic enzyme composition is a Trichoderma reesei cellulolytic enzyme composition comprising a CBH I (GENSEQP Accession No. AZY49536 (WO2012/103293)); a CBH II (GENSEQP Accession No. AZY49446 (WO2012/103288)), an AA9 (GH61 polypeptide; GENSEQP Accession No. BAL61510 (WO 2013/028912)), and a catalase (GENSEQP Accession No. BAC11005 (WO 2012/130120)).

[0711] In an embodiment the cellulolytic enzyme composition is a Trichoderma reesei cellulolytic enzyme composition comprising a CBH I (GENSEQP Accession No. AZY49446 (WO2012/103288); a CBH II (GENSEQP Accession No. AZY49446 (WO2012/103288)), a beta-glucosidase variant (GENSEQP Accession No. AZU67153 (WO 2012/44915)), with one or more, in particular all, of the following substitutions: F100D, S283G, N456E, F512Y; an AA9 (GH61 polypeptide; GENSEQP Accession No. BAL61510 (WO 2013/028912)), a GH10 xylanase (GENSEQP Accession No. BAK46118 (WO 2013/019827)), and a beta-xylosidase (GENSEQP Accession No. AZI04896 (WO 2011/057140)).

[0712] In an embodiment the cellulolytic composition is a Trichoderma reesei cellulolytic enzyme preparation comprising an EG I (Swissprot Accession No. P07981), EG II (EMBL Accession No. M19373), CBH I (supra); CBH II (supra); beta-glucosidase variant (supra) with the following substitutions: F100D, S283G, N456E, F512Y; an AA9 (GH61 polypeptide; supra), GH10 xylanase (supra); and beta-xylosidase (supra).

[0713] All cellulolytic enzyme compositions disclosed in WO 2013/028928 are also contemplated and hereby incorporated by reference.

[0714] The cellulolytic enzyme composition comprises or may further comprise one or more (several) proteins selected from the group consisting of a cellulase, a AA9 (i.e., GH61) polypeptide having cellulolytic enhancing activity, a hemicellulase, an expansin, an esterase, a laccase, a ligninolytic enzyme, a pectinase, a peroxidase, a protease, and a swollenin.

[0715] In one embodiment the cellulolytic enzyme composition is a commercial cellulolytic enzyme composition. Examples of commercial cellulolytic enzyme compositions suitable for use in a process of the invention include: CELLIC® CTec (Novozymes A/S), CELLIC® CTec2 (Novozymes A/S), CELLIC® CTec3 (Novozymes A/S), CELLUCLAST™ (Novozymes A/S), SPEZYME™ CP (Genencor Int.), ACCELLERASE™ 1000, ACCELLERASE 1500, ACCELLERASE™ TRIO (DuPont), FILTRASE® NL (DSM); METHAPLUS® S/L 100 (DSM), ROHAMENT™ 7069 W (Rohm GmbH), or ALTERNAFUEL® CMAX3™ (Dyadic International, Inc.). The cellulolytic enzyme composition may be added in an amount effective from about 0.001 to about 5.0 wt. % of solids, e.g., about 0.025 to about 4.0 wt. % of solids or about 0.005 to about 2.0 wt. % of solids.

[0716] Additional enzymes, and compositions thereof can be found in WO2011/153516 and WO2016/045569 (the contents of which are incorporated herein).

[0717] Additional polynucleotides encoding suitable cellulolytic enzymes may be obtained from microorganisms of any genus, including those readily available within the UniProtKB database (www.uniprot.org).

[0718] The cellulolytic enzyme coding sequences can also be used to design nucleic acid probes to identify and clone DNA encoding cellulolytic enzymes from strains of different genera or species, as described supra.

[0719] The polynucleotides encoding cellulolytic enzymes may also be identified and obtained from other sources including microorganisms isolated from nature (e.g., soil, composts, water, etc.) or DNA samples obtained directly from natural materials (e.g., soil, composts, water, etc.) as described supra.

[0720] Techniques used to isolate or clone polynucleotides encoding cellulolytic enzymes are described supra.

[0721] In one embodiment, the cellulolytic enzyme has a mature polypeptide sequence of at least 60%, e.g., at least 65%, at least 70%, at least 75%, at least 80%, at least 85%, at least 90%, at least 91%, at least 92%, at least 93%, at least 94%, at least 95%, at least 96%, at least 97%, at least 98%, at least 99%, or 100% sequence identity to any cellulolytic enzyme described or referenced herein (e.g., any endoglucanase, cellobiohydrolase, or beta-glucosidase). In one embodiment, the cellulolytic enzyme ha a mature polypeptide sequence that differs by no more than ten amino acids, e.g., by no more than five amino acids, by no more than four amino acids, by no more than three amino acids, by no more than two amino acids, or by one amino acid from any cellulolytic enzyme described or referenced herein. In one embodiment, the cellulolytic enzyme has a mature polypeptide sequence that comprises or consists of the amino acid sequence of any cellulolytic enzyme described or referenced herein, allelic variant, or a fragment thereof having cellulolytic enzyme activity. In one embodiment, the cellulolytic enzyme has an amino acid substitution, deletion, and/or insertion of one or more (e.g., two, several) amino acids. In some embodiments, the total number of amino acid substitutions, deletions and/or insertions is not more than 10, e.g., not more than 9, 8, 7, 6, 5, 4, 3, 2, or 1.

[0722] In some embodiments, the cellulolytic enzyme has at least 20%, e.g., at least 40%, at least 50%, at least 60%, at least 70%, at least 80%, at least 90%, at least 95%, at least 96%, at least 97%, at least 98%, at least 99%, or 100% of the cellulolytic enzyme activity of any cellulolytic enzyme described or referenced herein (e.g., any endoglucanase, cellobiohydrolase, or beta-glucosidase) under the same conditions.

[0723] In one embodiment, the cellulolytic enzyme coding sequence hybridizes under at least low stringency conditions, e.g., medium stringency conditions, medium-high stringency conditions, high stringency conditions, or very high stringency conditions with the full-length complementary strand of the coding sequence from any cellulolytic enzyme described or referenced herein (e.g., any endoglucanase, cellobiohydrolase, or beta-glucosidase). In one embodiment, the cellulolytic enzyme coding sequence has at least 65%, e.g., at least 70%, at least 75%, at least 80%, at least 85%, at least 85%, at least 90%, at least 91%, at least 92%, at least 93%, at least 94%, at least 95%, at least 96%, at least 97%, at least 98%, at least 99%, or 100% sequence identity with the coding sequence from any cellulolytic enzyme described or referenced herein.

[0724] In one embodiment, the polynucleotide encoding the cellulolytic enzyme comprises the coding sequence of any cellulolytic enzyme described or referenced herein (e.g., any endoglucanase, cellobiohydrolase, or beta-glucosidase). In one embodiment, the polynucleotide encoding the cellulolytic enzyme comprises a subsequence of the coding sequence from any cellulolytic enzyme described or referenced herein, wherein the subsequence encodes a polypeptide having cellulolytic enzyme activity. In one embodiment, the number of nucleotides residues in the subsequence is at least 75%, e.g., at least 80%, 85%, 90%, or 95% of the number of the referenced coding sequence.

[0725] The cellulolytic enzyme can also include fused polypeptides or cleavable fusion polypeptides, as described supra.

### Fermentation Products

[0726] A fermentation product can be any substance derived from the fermentation. The fermentation product can be, without limitation, an alcohol (e.g., arabinitol, n-butanol, isobutanol, ethanol, glycerol, methanol, ethylene glycol, 1,3-propanediol [propylene glycol], butanediol, glycerin, sorbitol, and xylitol); an alkane (e.g., pentane, hexane, heptane, octane, nonane, decane, undecane, and dodecane), a cycloalkane (e.g., cyclopentane, cyclohexane, cycloheptane, and cyclooctane), an alkene (e.g., pentene, hexene, heptene, and octene); an amino acid (e.g., aspartic acid, glutamic acid, glycine, lysine, serine, and threonine); a gas (e.g., methane, hydrogen (H₂), carbon dioxide (CO₂), and carbon monoxide (CO)); isoprene; a ketone (e.g., acetone); an organic acid (e.g., acetic acid, acetonic acid, adipic acid, ascorbic acid, citric acid, 2,5-diketo-D-gluconic acid, formic acid, fumaric acid, glucaric acid, gluconic acid, glucuronic acid, glutaric acid, 3-hydroxypropionic acid, itaconic acid, lactic acid, malic acid, malonic acid, oxalic acid, oxaloacetic acid, propionic acid, succinic acid, and xylonic acid); and polyketide.

[0727] In one embodiment, the fermentation product is an alcohol. The term “alcohol” encompasses a substance that contains one or more hydroxyl moieties. The alcohol can be, but is not limited to, n-butanol, isobutanol, ethanol, methanol, arabinitol, butanediol, ethylene glycol, glycerin, glycerol, 1,3-propanediol, sorbitol, xylitol. See, for example, Gong et al., 1999, Ethanol production from renewable resources, in Advances in Biochemical Engineering/Biotechnology, Scheper, T., ed., Springer-Verlag Berlin Heidelberg, Germany, 65: 207-241; Silveira and Jonas, 2002, Appl. Microbiol. Biotechnol. 59: 400-408; Nigam and Singh, 1995, Process Biochemistry 30(2): 117-124; Ezeji et al., 2003, World Journal of Microbiology and Biotechnology 19(6): 595-603. In one embodiment, the fermentation product is ethanol.

[0728] In another embodiment, the fermentation product is an alkane. The alkane may be an unbranched or a branched alkane. The alkane can be, but is not limited to, pentane, hexane, heptane, octane, nonane, decane, undecane, or dodecane.

[0729] In another embodiment, the fermentation product is a cycloalkane. The cycloalkane can be, but is not limited to, cyclopentane, cyclohexane, cycloheptane, or cyclooctane.

[0730] In another embodiment, the fermentation product is an alkene. The alkene may be an unbranched or a branched alkene. The alkene can be, but is not limited to, pentene, hexene, heptene, or octene.

[0731] In another embodiment, the fermentation product is an amino acid. The organic acid can be, but is not limited to, aspartic acid, glutamic acid, glycine, lysine, serine, or threonine. See, for example, Richard and Margaritis, 2004, Biotechnology and Bioengineering 87(4): 501-515.

[0732] In another embodiment, the fermentation product is a gas. The gas can be, but is not limited to, methane, H₂, CO₂, or CO. See, for example, Kataoka et al., 1997, Water Science and Technology 36(6-7): 41-47; and Gunaseelan, 1997, Biomass and Bioenergy 13(1-2): 83-114.

[0733] In another embodiment, the fermentation product is isoprene.

[0734] In another embodiment, the fermentation product is a ketone. The term “ketone” encompasses a substance that contains one or more ketone moieties. The ketone can be, but is not limited to, acetone.

[0735] In another embodiment, the fermentation product is an organic acid. The organic acid can be, but is not limited to, acetic acid, acetonic acid, adipic acid, ascorbic acid, citric acid, 2,5-diketo-D-gluconic acid, formic acid, fumaric acid, glucaric acid, gluconic acid, glucuronic acid, glutaric acid, 3-hydroxypropionic acid, itaconic acid, lactic acid, malic acid, malonic acid, oxalic acid, propionic acid, succinic acid, or xylonic acid. See, for example, Chen and Lee, 1997, Appl. Biochem. Biotechnol. 63-65: 435-448.

[0736] In another embodiment, the fermentation product is polyketide.

[0737] In some embodiments, the host cell or fermenting organism (or processes thereof), provide higher yield of fermentation product (e.g., ethanol) when compared to the same cell without the heterologous polynucleotide encoding a sugar transporter described herein under the same conditions (e.g., after 40 hours of fermentation). In some embodiments, the process results in at least 0.25%, such as 0.5%, 0.75%, 1.0%, 1.25%, 1.5%, 1.75%, 2%, 3% or 5% higher yield of the fermentation product (e.g., ethanol).

### Recovery

[0738] The fermentation product, e.g., ethanol, can optionally be recovered from the fermentation medium using any method known in the art including, but not limited to, chromatography, electrophoretic procedures, differential solubility, distillation, or extraction. For example, alcohol is separated from the fermented cellulosic material and purified by conventional methods of distillation. Ethanol with a purity of up to about 96 vol. % can be obtained, which can be used as, for example, fuel ethanol, drinking ethanol, i.e., potable neutral spirits, or industrial ethanol.

[0739] In some embodiments of the methods, the fermentation product after being recovered is substantially pure. With respect to the methods herein, “substantially pure” intends a recovered preparation that contains no more than 15% impurity, wherein impurity intends compounds other than the fermentation product (e.g., ethanol). In one variation, a substantially pure preparation is provided wherein the preparation contains no more than 25% impurity, or no more than 20% impurity, or no more than 10% impurity, or no more than 5% impurity, or no more than 3% impurity, or no more than 1% impurity, or no more than 0.5% impurity.

[0740] Suitable assays to test for the production of ethanol and contaminants, and sugar consumption can be performed using methods known in the art. For example, ethanol product, as well as other organic compounds, can be analyzed by methods such as HPLC (High Performance Liquid Chromatography), GC-MS (Gas Chromatography Mass Spectroscopy) and LC-MS (Liquid Chromatography-Mass Spectroscopy) or other suitable analytical methods using routine procedures well known in the art. The release of ethanol in the fermentation broth can also be tested with the culture supernatant. Byproducts and residual sugar in the fermentation medium (e.g., glucose or xylose) can be quantified by HPLC using, for example, a refractive index detector for glucose and alcohols, and a UV detector for organic acids (Lin et al., Biotechnol. Bioeng. 90:775 -779 (2005)), or using other suitable assay and detection methods well known in the art.

[0741] The invention described and claimed herein is not to be limited in scope by the specific aspects or embodiments herein disclosed, since these aspects/embodiments are intended as illustrations of several aspects of the invention. Any equivalent aspects are intended to be within the scope of this invention. Indeed, various modifications of the invention in addition to those shown and described herein will become apparent to those skilled in the art from the foregoing description. Such modifications are also intended to fall within the scope of the appended claims. In the case of conflict, the present disclosure including definitions will control. All references are specifically incorporated by reference for that which is described.

[0742] The following examples are offered to illustrate certain aspects/embodiments of the present invention, but not in any way intended to limit the scope of the invention as claimed.

The invention may further be described in the following numbered paragraphs:
[0743] Paragraph [1]. A recombinant host cell comprising a heterologous polynucleotide encoding a sugar transporter, wherein the transporter has a mature polypeptide sequence with at least 60%, e.g., at least 65%, 70%, 75%, 80%, 85%, 90%, 95%, 97%, 98%, 99%, or 100% sequence identity to any one of SEQ ID NOs: 257-397; and wherein the cell comprises an active pentose fermentation pathway.
[0744] Paragraph [2]. The recombinant host cell of paragraph [1], wherein the heterologous polynucleotide encoding a sugar transporter is operably linked to a promoter that is foreign to the polynucleotide.
[0745] Paragraph [3]. The recombinant host cell of paragraph [1] or [2], wherein the heterologous polynucleotide encodes a sugar transporter having a mature polypeptide sequence that differs by no more than ten amino acids, e.g., by no more than five amino acids, by no more than four amino acids, by no more than three amino acids, by no more than two amino acids, or by one amino acid from any one of SEQ ID NOs: 257-397.
[0746] Paragraph [4]. The recombinant host cell of any one of paragraphs [1]-[3], wherein the heterologous polynucleotide encodes a sugar transporter has a mature polypeptide sequence comprising or consisting of the amino acid sequence of any one of SEQ ID NOs: 257-397.
[0747] Paragraph [5]. The recombinant host cell of paragraphs [1]-[4], wherein the cell comprises an active xylose fermentation pathway.
[0748] Paragraph [6]. The recombinant host cell of paragraph [5], wherein the cell comprises one or more active xylose fermentation pathway genes selected from:
[0749] a heterologous polynucleotide encoding a xylose isomerase (XI), and
[0750] a heterologous polynucleotide encoding a xylulokinase (XK).
[0751] Paragraph [7]. The recombinant host cell of paragraph [5] or [6], wherein the cell comprises one or more active xylose fermentation pathway genes selected from:
[0752] a heterologous polynucleotide encoding a xylose reductase (XR),
[0753] a heterologous polynucleotide encoding a xylitol dehydrogenase (XDH), and
[0754] a heterologous polynucleotide encoding a xylulokinase (XK).
[0755] Paragraph [8]. The recombinant host cell of any one of paragraphs [1]-[7], wherein the cell comprises an active arabinose fermentation pathway.
[0756] Paragraph [9]. The recombinant host cell of paragraph [8], wherein the cell comprises one or more active arabinose fermentation pathway genes selected from:
[0757] a heterologous polynucleotide encoding a L-arabinose isomerase (Al),
[0758] a heterologous polynucleotide encoding a L-ribulokinase (RK), and
[0759] a heterologous polynucleotide encoding a L-ribulose-5-P4-epimerase (RSPE).
[0760] Paragraph [10]. The recombinant host cell of paragraph [8] or [9], wherein the cell comprises one or more active arabinose fermentation pathway genes selected from:
[0761] a heterologous polynucleotide encoding an aldose reductase (AR),
[0762] a heterologous polynucleotide encoding a L-arabinitol 4-dehydrogenase (LAD),
[0763] a heterologous polynucleotide encoding a L-xylulose reductase (LXR),
[0764] a heterologous polynucleotide encoding a xylitol dehydrogenase (XDH) and
[0765] a heterologous polynucleotide encoding a xylulokinase (XK).
[0766] Paragraph [11]. The recombinant host cell of any one of paragraphs [1]-[10], the cell comprises an active xylose fermentation pathway and an active arabinose fermentation pathway.
[0767] Paragraph [12]. The recombinant host cell of any one of paragraphs [1]-[11], with the proviso that the sugar transporter is not the transporter having a mature polypeptide sequence of SEQ ID NO: 390 (or a transporter having a mature polypeptide sequence with at least 80%, e.g., at least 85%, 90%, 95%, 97%, 98%, or 99% sequence identity to the transporter of SEQ ID NO: 390).
[0768] Paragraph [13]. A recombinant host cell comprising a heterologous polynucleotide encoding a sugar transporter, wherein the transporter has a mature polypeptide sequence with at least 60%, e.g., at least 65%, 70%, 75%, 80%, 85%, 90%, 95%, 97%, 98%, 99%, or 100% sequence identity to any one of SEQ ID NOs: 40, 53, 63, 72, 99, 108, 111, 123, 124 and 131 and wherein the cell comprises an active arabinose fermentation pathway.
[0769] Paragraph [14]. The recombinant host cell of paragraph [13], wherein the heterologous polynucleotide encodes a sugar transporter having a mature polypeptide sequence that differs by no more than ten amino acids, e.g., by no more than five amino acids, by no more than four amino acids, by no more than three amino acids, by no more than two amino acids, or by one amino acid from any one of SEQ ID NOs: 40, 53, 63, 72, 99, 108, 111, 123, 124 and 131.
[0770] Paragraph [15]. The recombinant host cell of paragraph [13] or [14], wherein the heterologous polynucleotide encodes a sugar transporter having a mature polypeptide sequence comprising or consisting of the amino acid sequence of any one of SEQ ID NOs: 40, 53, 63, 72, 99, 108, 111, 123, 124 and 131.
[0771] Paragraph [16]. A recombinant host cell comprising a heterologous polynucleotide encoding a sugar transporter, wherein the transporter has a mature polypeptide sequence with at least 60%, e.g., at least 65%, 70%, 75%, 80%, 85%, 90%, 95%, 97%, 98%, 99%, or 100% sequence identity to any one of SEQ ID NOs: 97, 116 and 138 and wherein the cell comprises an active xylose fermentation pathway.
[0772] Paragraph [17]. The recombinant host cell of paragraph [16], wherein the heterologous polynucleotide encodes a sugar transporter with a mature polypeptide sequence that differs by no more than ten amino acids, e.g., by no more than five amino acids, by no more than four amino acids, by no more than three amino acids, by no more than two amino acids, or by one amino acid from any one of SEQ ID NOs: 97, 116 and 138.
[0773] Paragraph [18]. The recombinant host cell of paragraph [16] or [17], wherein the heterologous polynucleotide encodes a sugar transporter having a mature polypeptide sequence comprising or consisting of the amino acid sequence of any one of SEQ ID NOs: 97, 116 and 138.
[0774] Paragraph [19]. The recombinant host cell of any one of paragraphs [1]-[18], wherein the cell further comprises a heterologous polynucleotide encoding a glucoamylase.
[0775] Paragraph [20]. The recombinant host cell of paragraph [19], wherein the glucoamylase has a mature polypeptide sequence with at least 60%, e.g., at least 65%, 70%, 75%, 80%, 85%, 90%, 95%, 97%, 98%, 99%, or 100% sequence identity the amino acid sequence of any one of SEQ ID NOs: 8, 102-113, 229, 230 and 244-250.
[0776] Paragraph [21]. The recombinant host cell of paragraph [19] or [20], wherein the heterologous polynucleotide encoding the glucoamylase is operably linked to a promoter that is foreign to the polynucleotide.
[0777] Paragraph [22]. The recombinant host cell of any one of paragraphs [1]-[21], wherein the cell further comprises a heterologous polynucleotide encoding an alpha-amylase.
[0778] Paragraph [23]. The recombinant host cell of paragraph [22], wherein the alpha-amylase has a mature polypeptide sequence with at least 60%, e.g., at least 65%, 70%, 75%, 80%, 85%, 90%, 95%, 97%, 98%, 99%, or 100% sequence identity the amino acid sequence of any one of SEQ ID NOs: 76-101, 121-174, 231 and 251-256.
[0779] Paragraph [24]. The recombinant host cell of paragraph [22] or [23], wherein the heterologous polynucleotide encoding the alpha-amylase is operably linked to a promoter that is foreign to the polynucleotide.
[0780] Paragraph [25]. The recombinant host cell of any one of paragraphs [1]-[24], wherein the cell further comprises a heterologous polynucleotide encoding a phospholipase.
[0781] Paragraph [26]. The recombinant host cell of paragraph [25], wherein the phospholipase has a mature polypeptide sequence with at least 60%, e.g., at least 65%, 70%, 75%, 80%, 85%, 90%, 95%, 97%, 98%, 99%, or 100% sequence identity the amino acid sequence of any one of SEQ ID NOs: 235, 236, 237, 238, 239, 240, 241 and 242.
[0782] Paragraph [27]. The recombinant host cell of paragraph [25] or [26], wherein the heterologous polynucleotide encoding phospholipase is operably linked to a promoter that is foreign to the polynucleotide.
[0783] Paragraph [28]. The recombinant host cell of any one of paragraphs [1]-[27], wherein the cell further comprises a heterologous polynucleotide encoding a trehalase.
[0784] Paragraph [29]. The recombinant host cell of paragraph [28], wherein the trehalase has a mature polypeptide sequence with at least 60%, e.g., at least 65%, 70%, 75%, 80%, 85%, 90%, 95%, 97%, 98%, 99%, or 100% sequence identity the amino acid sequence of any one of SEQ ID NOs: 175-226.
[0785] Paragraph [30]. The recombinant host cell of paragraph [27] or [28], wherein the heterologous polynucleotide encoding the trehalase is operably linked to a promoter that is foreign to the polynucleotide.
[0786] Paragraph [31]. The recombinant host cell of any one of paragraphs [1]-[30], wherein the cell further comprises a heterologous polynucleotide encoding a protease.
[0787] Paragraph [32]. The recombinant host cell of paragraph [31], wherein the protease has a mature polypeptide sequence with at least 60%, e.g., at least 65%, 70%, 75%, 80%, 85%, 90%, 95%, 97%, 98%, 99%, or 100% sequence identity the amino acid sequence of any one of SEQ ID NOs: 9-73.
[0788] Paragraph [33]. The recombinant host cell of paragraph [31] or [32], wherein the heterologous polynucleotide encoding the protease is operably linked to a promoter that is foreign to the polynucleotide.
[0789] Paragraph [34]. The recombinant host cell of any one of paragraphs [1]-[33], wherein the cell further comprises a heterologous polynucleotide encoding a pullulanase.
[0790] Paragraph [35]. The recombinant host cell of paragraph [34], wherein the pullulanase has a mature polypeptide sequence with at least 60%, e.g., at least 65%, 70%, 75%, 80%, 85%, 90%, 95%, 97%, 98%, 99%, or 100% sequence identity the amino acid sequence of any one of SEQ ID NOs: 114-120.
[0791] Paragraph [36]. The recombinant host cell of paragraph [34] or [35], wherein the heterologous polynucleotide encoding the pullulanase is operably linked to a promoter that is foreign to the polynucleotide.
[0792] Paragraph [37]. The recombinant host cell of any one of paragraphs [1]-[36], wherein the cell is capable of higher anaerobic growth rate on pentose (e.g., xylose and/or arabinose) compared to the same cell without the heterologous polynucleotide encoding a sugar transporter (e.g., under conditions described in Example 2).
[0793] Paragraph [38]. The recombinant host cell of any one of paragraphs [1]-[38], wherein the cell is capable of a higher rate of pentose consumption (e.g., at least 5%, 10%, 15%, 20%, 25%, 30%, 35%, 40%, 45%, 50%, 60%, 75% or 90% higher xylose and/or arabinose consumption) compared to the same cell without the heterologous polynucleotide encoding a sugar transporter (e.g., under conditions described in Example 2).
[0794] Paragraph [39]. The recombinant host cell of any one of paragraphs [1]-[38], wherein the cell is capable of higher pentose (e.g., xylose and/or arabinose) consumption compared to the same cell without the heterologous polynucleotide encoding a sugar transporter at about or after 120 hours fermentation (e.g., under conditions described in Example 2).
[0795] Paragraph [40]. The recombinant host cell of paragraph [39], wherein the cell is capable of consuming more than 65%, e.g., at least 70%, 75%, 80%, 85%, 90%, 95% of pentose (e.g., xylose and/or arabinose) in the medium at about or after 120 hours fermentation (e.g., under conditions described in Example 2).
[0796] Paragraph [41]. The recombinant host cell of any one of paragraphs [1]-[40], wherein the cell is capable of higher ethanol production compared to the same cell without the heterologous polynucleotide encoding a sugar transporter under the same conditions (e.g., after 40 hours of fermentation).
[0797] Paragraph [42]. The recombinant host cell of any one of paragraphs [1]-[41], wherein the cell further comprises a heterologous polynucleotide encoding a transketolase (TKL1).
[0798] Paragraph [43]. The recombinant host cell of any one of paragraphs [1]-[42], wherein the cell further comprises a heterologous polynucleotide encoding a transaldolase (TAL1).
[0799] Paragraph [44]. The recombinant host cell of any one of paragraphs [1]-[43], wherein the cell further comprises a disruption to an endogenous gene encoding a glycerol 3-phosphate dehydrogenase (GPD).
[0800] Paragraph [45]. The recombinant host cell of any one of paragraphs [1]-[44], wherein the cell further comprises a disruption to an endogenous gene encoding a glycerol 3-phosphatase (GPP).
[0801] Paragraph [46]. The recombinant host cell of any one of paragraphs [1]-[45], wherein the cell is a yeast cell.
[0802] Paragraph [47]. The recombinant host cell of any one of paragraphs [1]-[46], wherein the cell is a Saccharomyces, Rhodotorula, Schizosaccharomyces, Kluyveromyces, Pichia, Hansenula, Rhodosporidium, Candida, Yarrowia, Lipomyces, Cryptococcus, or Dekkera sp. cell.
[0803] Paragraph [48]. The recombinant host cell of any one of paragraphs [1]-[47], wherein the cell is a Saccharomyces cerevisiae cell.
[0804] Paragraph [49]. A composition comprising the recombinant host cell of any one of paragraphs [1]-[48] and one or more naturally occurring and/or non-naturally occurring components, such as components are selected from the group consisting of: surfactants, emulsifiers, gums, swelling agents, and antioxidants.
[0805] Paragraph [50]. A method of producing a derivative of a recombinant host cell of any one of paragraphs [1]-[49], the method comprising:
   [0806] (a) providing:
      [0807] (i) a first host cell; and
      [0808] (ii) a second host cell, wherein the second host cell is a recombinant host cell of any one of paragraphs [1]-[49];
   [0809] (b) culturing the first host cell and the second host cell under conditions which permit combining of DNA between the first and second host cells;
   [0810] (c) screening or selecting for a derive host cell.
[0811] Paragraph [51]. A method of producing a fermentation product from a starch-containing or cellulosic-containing material, the method comprising:

[0812] (a) saccharifying the starch-containing or cellulosic-containing material; and

[0813] (b) fermenting the saccharified material of step (a) with the recombinant host cell of any one of paragraphs [1]-[50] under suitable conditions to produce the fermentation product.
[0814] Paragraph [52]. The method of paragraph [51], wherein saccharification of step (a) occurs on a starch-containing material, and wherein the starch-containing material is either gelatinized or ungelatinized starch.
[0815] Paragraph [53]. The method of paragraph [52], comprising liquefying the starch-containing material by contacting the material with an alpha-amylase prior to saccharification.
[0816] Paragraph [54]. The method of paragraph [52] or [53], wherein liquefying the starch-containing material and/or saccharifying the starch-containing material is conducted in presence of exogenously added protease.
[0817] Paragraph [55]. The method of any one of paragraphs [51]-[54], wherein fermentation is performed under reduced nitrogen conditions (e.g., less than 1000 ppm urea or ammonium hydroxide, such as less than 750 ppm, less than 500 ppm, less than 400 ppm, less than 300 ppm, less than 250 ppm, less than 200 ppm, less than 150 ppm, less than 100 ppm, less than 75 ppm, less than 50 ppm, less than 25 ppm, or less than 10 ppm).
[0818] Paragraph [56]. The method of any one of paragraphs [51]-[55], wherein fermentation and saccharification are performed simultaneously in a simultaneous saccharification and fermentation (SSF).
[0819] Paragraph [57]. The method of any one of paragraphs [51]-[55], wherein fermentation and saccharification are performed sequentially (SHF).
[0820] Paragraph [58]. The method of any one of paragraphs paragraph [51]-[57], comprising recovering the fermentation product from the fermentation.
[0821] Paragraph [59]. The method of paragraph [58], wherein recovering the fermentation product from the fermentation comprises distillation.
[0822] Paragraph [60]. The method of any one of paragraphs [51]-[59], wherein the fermentation product is ethanol.
[0823] Paragraph [61]. The method of any one of paragraphs [51]-[60], wherein step (a) comprises contacting the cellulosic and/or starch-containing with an enzyme composition.
[0824] Paragraph [62]. The method of any one of paragraphs [51]-[61], wherein saccharification occurs on a cellulosic material, and wherein the cellulosic material is pretreated.
[0825] Paragraph [63]. The method of paragraph [62], wherein the pretreatment is a dilute acid pretreatment.
[0826] Paragraph [64]. The method of paragraph [62] or [63], wherein saccharification occurs on a cellulosic material, and wherein step (a) comprises contacting the cellulosic enzyme composition, and wherein the enzyme composition comprises one or more enzymes selected from a cellulase, an AA9 polypeptide, a hemicellulase, a CIP, an esterase, an expansin, a ligninolytic enzyme, an oxidoreductase, a pectinase, a protease, and a swollenin.
[0827] Paragraph [65]. The method of paragraph [64], wherein the cellulase is one or more enzymes selected from an endoglucanase, a cellobiohydrolase, and a beta-glucosidase.
[0828] Paragraph [66]. The method of paragraph [64] or [65], wherein the hemicellulase is one or more enzymes selected a xylanase, an acetylxylan esterase, a feruloyl esterase, an arabinofuranosidase, a xylosidase, and a glucuronidase.
[0829] Paragraph [67]. The method of any one of paragraphs [51]-[66], wherein the method results in higher yield of fermentation product when compared to the method using the same cell without the heterologous polynucleotide encoding a sugar transporter (e.g., under conditions described in Example 2).
[0830] Paragraph [68]. The method of paragraph [67], wherein the method results in at least 0.25% (e.g., 0.5%, 0.75%, 1.0%, 1.25%, 1.5%, 1.75%, 2%, 3% or 5%) higher yield of fermentation product.
[0831] Paragraph [69]. The method of any one of paragraphs [51]-[68], wherein fermentation is conducted under low oxygen (e.g., anaerobic) conditions.
[0832] Paragraph [70]. The method of any one of paragraphs [51]-[69] wherein a greater amount of pentose (e.g., xylose and/or arabinose) is consumed (e.g., at least 5%, 10%, 15%, 20%, 25%, 30%, 35%, 40%, 45%, 50%, 60%, 75% or 90% more) when compared to the method using the same cell without the heterologous polynucleotide encoding a sugar transporter (e.g., under conditions described in Example 2).
[0833] Paragraph [71]. The method of any one of any one of paragraphs [51]-[70], wherein more than 65%, e.g., at least 70%, 75%, 80%, 85%, 90%, 95% of pentose (e.g., xylose and/or arabinose) in the medium is consumed (e.g., under conditions described in Example 2).
[0834] Paragraph [72]. Use of a recombinant host cell of any one of paragraphs [1]-[49] in the production of ethanol.

### EXAMPLES

### Materials and Methods

[0835] Chemicals used as buffers and substrates were commercial products of at least reagent grade.

[0836] Yeast strain S509-004 is was prepared according the breeding procedures described in U.S. Pat. No. 8,257,959 and further comprises an active arabinose and xylose fermentation pathways with heterologous genes expressing L-arabinitol 4-dehydrogenase (LAD), L-xylulose reductase (LXR), D-xylulose reductase xylitol dehydrogenase (XDH) and xylulokinase (XK). See, U.S. Provisional Application No. 63/024,010 entitled “Improved Microorganisms for Arabinose Fermentation” filed May 13, 2020.

### Example 1

### Construction of Yeast Strains Expressing a Heterologous Sugar Transporter

[0837] This example describes the construction of yeast cells containing a heterologous sugar transporter under the control of an S. cerevisiae TEF2 promoter (SEQ ID NO: 2). Three or four pieces of DNA containing the promoter, gene (or gene in two pieces) and terminator were designed to allow for homologous recombination between the 3 or 4 DNA fragments and into the Intl locus of the yeast strain S509-C04. The resulting strains have one fragment (left fragment) containing the TEF2 promoter, one fragment (middle fragment) containing the sugar transporter coding sequence and one fragment (right fragment) containing the PRM9 terminator (SEQ ID NO: 243) integrated into the S. cerevisiae genome at the XII-2 locus.

### Construction of the Promoter-Containing Fragments (Left Fragments)

[0838] Synthetic linear uncloned DNA containing 300 bp homology to the Int1 site and the S. cerevisiae TEF2 promoter was synthesized by Thermo Fischer Scientific (Waltham, Mass.) and PCR-amplified with primers 1229212 (5′-TTCTT ACCAA TCCTT TCATA-3′; SEQ ID NO: 398) and 1224106 (5′-TTTGT TCTAG CTTAA TTATA GTTCG TTG-3′; SEQ ID NO: 399). Fifty pmoles each of forward and reverse primer was used in 24 PCR reactions containing 100 ng of plasmid DNA as template and 5× Platinum SuperFi PCR Master Mix (Thermo Fisher Scientific) in a final volume of 50 μL. The PCR was performed in a T100™ Thermal Cycler (Bio-Rad Laboratories, Inc.; Hercules, Calif.) programmed for one cycle at 98° C. for 30 seconds followed by 30 cycles each at 98° C. for 10 seconds, 54° C. for 10 seconds, and 72° C. for 30 seconds with a final extension at 72° C. for 5 minutes. Following thermocycling, the PCR reaction products gel isolated and cleaned up using the NucleoSpin Gel and PCR clean-up kit (Machery-Nagel; Duren, Germany).

### Construction of the Transporter-Containing Fragments (Middle Fragments)

[0839] Synthetic linear uncloned DNA containing 50 bp of the TEF2 promoter, the sugar transporter gene and 50 bp of the PRM9 terminator were synthesized by Twist Bioscience (San Francisco, Calif.) or Thermo Fisher Scientific.

### Construction of the Terminator-Contain Fragment (Right Fragment)

[0840] Synthetic linear uncloned DNA 18AFCGPC containing the S. cerevisiae PRM9 terminator and 300 bp homology to the Intl site was synthesized by Thermo Fisher Scientific and PCR-amplified with primers 1229631 (5′-TAAAC AGAAG ACGGG AGACA CTAG-3′; SEQ ID NO: 400) and 1229213 (5′-AGGGC TAAAG TCTCA TGAAA-3′; SEQ ID NO: 401). Fifty pmoles each of forward and reverse primer was used in 24 PCR reactions containing 100 ng of plasmid DNA as template and 5× Platinum SuperFi PCR Master Mix (Thermo Fisher Scientific) in a final volume of 50 μL. The PCR was performed in a T100™ Thermal Cycler (Bio-Rad Laboratories, Inc.) programmed for one cycle at 98° C. for 30 seconds followed by 30 cycles each at 98° C. for 10 seconds, 59° C. for 10 seconds, and 72° C. for 30 seconds with a final extension at 72° C. for 5 minutes. Following thermocycling, the PCR reaction products gel isolated and cleaned up using the NucleoSpin Gel and PCR clean-up kit (Machery-Nagel).

### Integration of the Left, Middle and Right-Hand Fragments

[0841] The yeast strain S509-C04 was transformed with the left, middle and right integration fragments described above. In each transformation pool a fixed left fragment and right fragment with 200 ng of each fragment was used. The middle fragment(s) consisted of the sugar transporter gene with 200-400 ng of each fragment. To aid homologous recombination of the left, middle and right fragments at the genomic Int1 sites a plasmid containing cas9 and guide RNA specific to XII-2 (pMIBa457; FIG. 3) was also used in the transformation. These 4-5 components were transformed into the into S. cerevisiae strain S509-C04 following a yeast electroporation protocol. Transformants were selected on YPD+cloNAT to select for transformants that contain the cas9 plasmid pMIBa457. Transformants were picked using a Q-pix Colony Picking System (Molecular Devices; San Jose, Calif.) to inoculate 1 well of 96-well plate containing YPD+cloNAT media. The plates were grown for 2 days then glycerol was added to 20% final concentration and the plates were stored at −80° C. until needed. Integration of specific sugar transporter construct was verified by PCR with locus specific primers and subsequent sequencing. The resulting strains were used in the following examples as described below.

### Example 2

### Evaluation of Yeast Strains Expressing a Heterologous Sugar Transporter

[0842] Yeast strains from Example 1 expressing a heterologous sugar transporter were evaluated for growth in media where xylose or arabinose were the sole carbon source. The Growth Profiler (Enzyscreen; Heemstede, Netherlands) was used to evaluate strain growth. The Growth Profiler is an incubator that can simultaneously control growth conditions, take images of clear-bottom multi-titer growth plates, and measure cell density over time. The software GP Viewer converts pixels of defined regions per well of each image to RBG (red, blue, green) values; green values are translated to identify growth rates for analysis.

[0843] To prepare the strains for evaluation of growth in YNB+0.5% arabinose or 0.5% xylose media, yeast strains were grown for 24 hours in YPD medium with 2% glucose, at 30° C. and 300 RPM. An inoculum of yeast was added to Growth Profiler plates containing 250 uL of medium (YNB with 0.5% arabinose or 0.5% xylose). Plates are secured in the Growth Profiler and grown at 250 RPM, 30° C. for 120 hours. Time intervals between each photo was 10 minutes. Growth evaluation was quenched by adding and mixing 50 uL of 8% H₂SO₄. Samples were centrifuged at 3000 RPM for 10 minutes and the supernatant was collected for HPLC analysis for remaining arabinose and xylose concentrations. Slope of each strain was calculated by taking the ratio of rise (green value) over run (time (hours)) during exponential phase. Strains with the highest slopes were able to grow best in the media and those with the least amount of remaining arabinose or xylose consumed the most C5 sugar. Results are shown in Table 7.

TABLE 7

| | | | | Arabinose | Arabinose | Xylose | Xylose |
|---|---|---|---|---|---|---|---|
| | | | | Slope | consumed | Slope | consumed |
| Strain ID | Gene ID | Gene DB | Donor Organism | (g-value/h) | (g/L) | (g-value/h) | (g/L) |
| S509-C04 | — | — | — | 0.2758737 | 3.08525 | 0.522 | 4.71275 |
| S622-A05 | A1C8W7 | SWISSPROT | Aspergillus clavatus | 0.0002404 | 0.596 | 0 | 0.05 |
| S622-A10 | A0A0R1SSI1 | SWISSPROT | Lactobacillus versmoldensis | 0.2765996 | 2.984 | 0.516 | 4.694 |
| S622-B10 | A0A0R1SSI1 | SWISSPROT | Lactobacillus versmoldensis | 0.3355385 | 3.272 | 0.517 | 4.664 |
| S622-C01 | A0A078DBU3 | SWISSPROT | Brassica napus | 0.396221 | 4.916 | 0.477 | 4.712 |
| S622-C02 | A0A087HLR1 | SWISSPROT | Arabis alpina | 0.3901352 | 3.548 | 0.523 | 4.682 |
| S622-C08 | A1C8W7 | SWISSPROT | Aspergillus clavatus | −0.004996 | 0.62 | 0 | 0 |
| S622-C10 | A0A0R1SSI1 | SWISSPROT | Lactobacillus versmoldensis | 0.3364993 | 3.176 | 0.436 | 4.406 |
| S622-C12 | A0A0W0DYZ4 | TREMBL | Candida glabrata | 0.2900236 | 2.96 | 0.513 | 4.682 |
| | | | (Torulopsis glabrata) | | | | |
| S622-D01 | A0A078DBU3 | SWISSPROT | Brassica napus | 0.4051435 | 4.94 | 0.398 | 4.37 |
| S622-D02 | A0A087HLR1 | SWISSPROT | Arabis alpina | 0.3841702 | 3.404 | 0.487 | 4.652 |
| S622-D07 | A1C8W7 | SWISSPROT | Aspergillus clavatus | 0.6346935 | 5 | 0.543 | 5 |
| S622-D08 | A1DAC2 | SWISSPROT | Neosartorya fischeri | 0.4000574 | 3.236 | 0.531 | 4.712 |
| | | | (Aspergillus fischerianus) | | | | |
| S622-D10 | A0A0R1SSI1 | SWISSPROT | Lactobacillus versmoldensis | 0.2935952 | 2.972 | 0.459 | 4.334 |
| S622-D12 | A0A0W0DYZ4 | TREMBL | Candida glabrata | 0.260369 | 2.864 | 0.524 | 4.676 |
| | | | (Torulopsis glabrata) | | | | |
| S622-E01 | A0A078DBU3 | SWISSPROT | Brassica napus | 0.3742188 | 4.508 | 0.418 | 4.322 |
| S622-E03 | A0A090BHJ4 | SWISSPROT | Kluyveromyces marxianus | 0.4265329 | 3.908 | 0.503 | 4.736 |
| | | | (Candida kefyr) | | | | |
| S622-E04 | P43581 | SWISSPROT | Saccharomyces cerevisiae | 0.3291398 | 3.128 | 0.53 | 4.718 |
| S622-E08 | A1DAC2 | SWISSPROT | Neosartorya fischeri | 0.3303353 | 3.284 | 0.569 | 4.778 |
| | | | (Aspergillus fischerianus) | | | | |
| S622-F03 | A0A090BHJ4 | SWISSPROT | Kluyveromyces marxianus | 0.4234165 | 3.836 | 0.54 | 4.754 |
| | | | (Candida kefyr) | | | | |
| S622-F04 | P43581 | SWISSPROT | Saccharomyces cerevisiae | 0.3804804 | 3.116 | 0.489 | 4.67 |
| S622-F07 | A1C8W7 | SWISSPROT | Aspergillus clavatus | 0.519784 | 5 | 0.526 | 4.802 |
| S622-F10 | A0A0R1SSI1 | SWISSPROT | Lactobacillus versmoldensis | 0.3267609 | 3.212 | 0.557 | 4.67 |
| S622-G02 | A0A087HLR1 | SWISSPROT | Arabis alpina | 0.3307279 | 3.308 | 0.433 | 4.388 |
| S622-G03 | A0A090BHJ4 | SWISSPROT | Kluyveromyces marxianus | 0.4192362 | 3.86 | 0.537 | 4.64 |
| | | | (Candida kefyr) | | | | |
| S622-G04 | P43581 | SWISSPROT | Saccharomyces cerevisiae | 0.3282136 | 2.996 | 0.563 | 4.7 |
| S622-G10 | A0A0R1SSI1 | SWISSPROT | Lactobacillus versmoldensis | 0.3147277 | 3.056 | 0.551 | 4.61 |
| S622-H03 | A0A090BHJ4 | SWISSPROT | Kluyveromyces marxianus | 0.1847741 | 2.864 | 0.539 | 4.658 |
| | | | (Candida kefyr) | | | | |
| S622-H04 | P43581 | SWISSPROT | Saccharomyces cerevisiae | 0.3771452 | 3.392 | 0.535 | 4.664 |
| S622-H07 | A1C8W7 | SWISSPROT | Aspergillus clavatus | 0.2906293 | 4.412 | 0.515 | 4.784 |
| S622-H08 | A1DAC2 | SWISSPROT | Neosartorya fischeri | 0.312139 | 3.248 | 0.563 | 4.742 |
| | | | (Aspergillus fischerianus) | | | | |
| S622-H12 | A0A0R1SSI1 | SWISSPROT | Lactobacillus versmoldensis | 0.3497422 | 3.224 | 0.585 | 4.664 |
| S623-A04 | AOD63543 | GENESEQP | Pichia guilliermondii | 0.3838818 | 3.716 | 0.55 | 4.778 |
| S623-A05 | A0A1A0HK54 | SWISSPROT | Metschnikowia bicuspidata var. bicuspidata | 0.2624329 | 2.84 | 0.532 | 4.712 |
| S623-A06 | A0A1E4T6F0 | TREMBL | Candida arabinofermentans | 0.3354888 | 3.164 | 0.514 | 4.76 |
| S623-A11 | B6HE12 | SWISSPROT | Penicillium rubens | 0.4258612 | 4.844 | 0.489 | 4.778 |
| | | | (Penicillium chrysogenum) | | | | |
| S623-A12 | BBZ79998 | GENESEQP | Candida intermedia | 0.3688479 | 3.38 | 0 | 4.646 |
| S623-B02 | A5DWD7 | SWISSPROT | Lodderomyces elongisporus | 0.3527794 | 3.836 | 0.551 | 5 |
| | | | (Saccharomyces elongisporus) | | | | |
| S623-B05 | A0A1A0HK54 | SWISSPROT | Metschnikowia bicuspidata var. bicuspidata | 0.3198046 | 3.164 | 0.516 | 4.736 |
| S623-B08 | A0A1G4MFR0 | SWISSPROT | Lachancea fermentati | 0.4174188 | 3.956 | 0.488 | 4.796 |
| | | | (Zygosaccharomyces fermentati) | | | | |
| S623-B09 | B1H0U6 | SWISSPROT | Ambrosiozyma monospora | 0.3155448 | 2.984 | 0.507 | 4.658 |
| S623-C02 | A5DWD7 | SWISSPROT | Lodderomyces elongisporus | 0.4013034 | 3.968 | 0.517 | 4.79 |
| | | | (Saccharomyces elongisporus) | | | | |
| S623-C03 | ABN64726 | GENPEPT | Pichia stipitis | 0.290072 | 3.512 | 0.523 | 4.676 |
| S623-C04 | AOD63543 | GENESEQP | Pichia guilliermondii | 0.3696066 | 3.812 | 0.532 | 4.664 |
| S623-C05 | A0A1A0HK54 | SWISSPROT | Metschnikowia bicuspidata var. bicuspidata | 0.3195019 | 3.152 | 0.53 | 4.634 |
| S623-C10 | B1H0U7 | SWISSPROT | Ambrosiozyma monospora | 0.3464645 | 2.756 | 0.537 | 4.436 |
| S623-D03 | ABN64726 | GENPEPT | Pichia stipitis | 0.3427166 | 3.644 | 0.545 | 4.754 |
| S623-D07 | A0A1G4JE77 | TREMBL | Lachancea meyersii | 0.2694658 | 3.02 | 0.507 | 4.58 |
| S623-D08 | A0A1G4MFR0 | SWISSPROT | Lachancea fermentati | 0.456073 | 3.908 | 0.523 | 4.694 |
| | | | (Zygosaccharomyces fermentati) | | | | |
| S623-D09 | B1H0U6 | SWISSPROT | Ambrosiozyma monospora | 0.4450422 | 5 | 0.433 | 4.58 |
| S623-D10 | B1H0U7 | SWISSPROT | Ambrosiozyma monospora | 0.3692674 | 3.032 | 0.539 | 4.364 |
| S623-D12 | BBZ79998 | GENESEQP | Candida intermedia | 0.3983482 | 3.704 | 0.566 | 4.298 |
| S623-E02 | A5DWD7 | SWISSPROT | Lodderomyces elongisporus | 0.393257 | 3.884 | 0.495 | 4.778 |
| | | | (Saccharomyces elongisporus) | | | | |
| S623-E07 | A0A1G4JE77 | TREMBL | Lachancea meyersii | 0.2756948 | 3.08 | 0.478 | 4.784 |
| S623-E08 | A0A1G4MFR0 | SWISSPROT | Lachancea fermentati | 0.3490631 | 4.136 | 0.487 | 4.796 |
| | | | (Zygosaccharomyces fermentati) | | | | |
| S623-E10 | B1H0U7 | SWISSPROT | Ambrosiozyma monospora | 0.4128228 | 3.476 | 0.479 | 4.724 |
| S623-F01 | A5DPY9 | SWISSPROT | Meyerozyma guilliermondii | 0.3230665 | 3.176 | 0.563 | 4.778 |
| | | | (Candida guilliermondii) | | | | |
| S623-F02 | A5DWD7 | SWISSPROT | Lodderomyces elongisporus | 0.4153273 | 3.788 | 0.451 | 4.394 |
| | | | (Saccharomyces elongisporus) | | | | |
| S623-F03 | ABN64726 | GENPEPT | Pichia stipitis | 0.3152494 | 3.56 | 0.511 | 4.7 |
| S623-F04 | AOD63543 | GENESEQP | Pichia guilliermondii | 0.2754059 | 3.068 | 0.571 | 4.688 |
| S623-F07 | A0A1G4JE77 | TREMBL | Lachancea meyersii | 0.3071527 | 2.9 | 0.477 | 4.502 |
| S623-G05 | A0A1A0HK54 | SWISSPROT | Metschnikowia bicuspidata var. bicuspidata | 0.3063656 | 3.152 | 0.513 | 4.688 |
| S623-G06 | A0A1E4T6F0 | TREMBL | Candida arabinofermentans | 0.3439764 | 3.128 | 0.541 | 4.646 |
| S623-G09 | B1H0U6 | SWISSPROT | Ambrosiozyma monospora | 0.2763948 | 3.968 | 0.503 | 4.742 |
| S623-H02 | A5DWD7 | SWISSPROT | Lodderomyces elongisporus | 0.3363999 | 3.776 | 0.553 | 4.826 |
| | | | (Saccharomyces elongisporus) | | | | |
| S623-H03 | ABN64726 | GENPEPT | Pichia stipitis | 0.4032777 | 3.584 | 0.507 | 4.646 |
| S623-H04 | AOD63543 | GENESEQP | Pichia guilliermondii | 0.3763735 | 4.28 | 0.566 | 4.784 |
| S623-H05 | A0A1A0HK54 | SWISSPROT | Metschnikowia bicuspidata var. bicuspidata | 0.3924578 | 3.368 | 0.538 | 4.58 |
| S623-H07 | A0A1G4JE77 | TREMBL | Lachancea meyersii | 0.3109583 | 3.068 | 0.418 | 4.766 |
| S623-H10 | B1H0U7 | SWISSPROT | Ambrosiozyma monospora | 0.3533139 | 2.708 | 0.53 | 4.472 |
| S623-H12 | BBZ79998 | GENESEQP | Candida intermedia | 0.4142323 | 3.704 | 0.559 | 4.688 |
| S624-A01 | A0A1K2I4N4 | SWISSPROT | Lactobacillus rennini | 0.3198507 | 4.856 | 0.508 | 4.55 |
| S624-A02 | A0A1L0BAU2 | SWISSPROT | Candida intermedia | 0.2888697 | 2.876 | 0.543 | 4.364 |
| S624-A06 | BFJ94472 | GENESEQP | Metschnikowia sp | 0.3889313 | 3.2 | 0.531 | 4.724 |
| S624-A10 | A0A1N6MBZ0 | SWISSPROT | Candida galli | 0.381647 | 3.344 | 0.571 | 4.31 |
| S624-B02 | A0A1L0BAU2 | SWISSPROT | Candida intermedia | 0.2858605 | 2.888 | 0.519 | 4.718 |
| S624-B05 | BFJ89633 | GENESEQP | Saccharomyces cerevisiae | 0.3280016 | 3.044 | 0.557 | 4.454 |
| S624-B06 | BFJ94472 | GENESEQP | Metschnikowia sp | 0.3540393 | 3.164 | 0.513 | 4.724 |
| S624-C01 | A0A1K2I4N4 | SWISSPROT | Lactobacillus rennini | 0.311077 | 2.828 | 0.526 | 4.676 |
| S624-C03 | A0A1L0BZU1 | SWISSPROT | Candida intermedia | 0.3274216 | 2.624 | 0.531 | 3.944 |
| S624-C05 | BFJ89633 | GENESEQP | Saccharomyces cerevisiae | 0.3350908 | 3.044 | 0.551 | 4.604 |
| S624-C06 | BFJ94472 | GENESEQP | Metschnikowia sp | 0.3454849 | 2.924 | 0.524 | 4.766 |
| S624-C07 | BFJ94474 | GENESEQP | Metschnikowia sp | 0.2834116 | 2.576 | 0.462 | 4.724 |
| S624-C10 | A0A1N6MBZ0 | SWISSPROT | Candida galli | 0.3861381 | 3.296 | 0.566 | 4.502 |
| S624-C12 | A0A1Y6JY60 | SWISSPROT | Lactobacillus zymae | 0.3042494 | 2.852 | 0.514 | 4.508 |
| S624-D08 | C4B4V9 | SWISSPROT | Corynebacterium glutamicum | 0.3458725 | 2.876 | 0.502 | 4.364 |
| | | | (Brevibacterium saccharolyticum) | | | | |
| S624-D12 | A0A1Y6JY60 | SWISSPROT | Lactobacillus zymae | 0.3330445 | 2.972 | 0.437 | 4.136 |
| S624-E02 | A0A1L0BAU2 | SWISSPROT | Candida intermedia | 0.3179369 | 3.008 | 0.515 | 4.778 |
| S624-E04 | A0A1L9U9S9 | SWISSPROT | Aspergillus brasiliensis | 0.376655 | 4.916 | 0.436 | 4.616 |
| S624-E07 | BFJ94474 | GENESEQP | Metschnikowia sp | 0.1852056 | 2.444 | 0.58 | 4.664 |
| S624-E10 | A0A1N6MBZ0 | SWISSPROT | Candida galli | 0.3133389 | 3.032 | 0.516 | 4.148 |
| S624-F07 | BFJ94474 | GENESEQP | Metschnikowia sp | 0.3148168 | 2.912 | 0.563 | 4.742 |
| S624-F08 | C4B4V9 | SWISSPROT | Corynebacterium glutamicum | 0.3466282 | 3.068 | 0.553 | 4.694 |
| | | | (Brevibacterium saccharolyticum) | | | | |
| S624-F10 | A0A1N6MBZ0 | SWISSPROT | Candida galli | 0.3296145 | 3.2 | 0.53 | 4.28 |
| S624-G07 | BFJ94474 | GENESEQP | Metschnikowia sp | 0.3518836 | 3.236 | 0.551 | 4.466 |
| S624-G08 | C4B4V9 | SWISSPROT | Corynebacterium glutamicum | 0.3078721 | 3.02 | 0.545 | 4.658 |
| | | | (Brevibacterium saccharolyticum) | | | | |
| S624-G10 | A0A1N6MBZ0 | SWISSPROT | Candida galli | 0.3440856 | 3.02 | 0.529 | 4.166 |
| S624-H07 | BFJ94474 | GENESEQP | Metschnikowia sp | 0.31948 | 2.84 | 0.517 | 4.49 |
| S624-H08 | C4B4V9 | SWISSPROT | Corynebacterium glutamicum | 0.3131478 | 3.08 | 0.523 | 4.79 |
| | | | (Brevibacterium saccharolyticum) | | | | |
| S624-H09 | C4B4V9 | SWISSPROT | Corynebacterium glutamicum | 0.3360712 | 3.152 | 0.534 | 4.64 |
| | | | (Brevibacterium saccharolyticum) | | | | |
| S624-H12 | A0A1Y6JY60 | SWISSPROT | Lactobacillus zymae | 0.1811037 | 2.312 | 0.541 | 4.22 |
| S625-A02 | CAG57753 | GENPEPT | Candida glabrata | 0.2905378 | 3.224 | 0.398 | 4.748 |
| S625-A07 | A0A202G714 | SWISSPROT | Clavispora lusitaniae | 0.3753871 | 3.26 | 0.515 | 4.772 |
| | | | (Candida lusitaniae) | | | | |
| S625-A09 | CAG87483 | GENPEPT | Debaryomyces hansenii | 0.3616796 | 2.696 | 0.551 | 4.712 |
| S625-B02 | CAG57753 | GENPEPT | Candida glabrata | 0.2782116 | 3.248 | 0.418 | 4.778 |
| S625-B04 | CAG60202 | GENPEPT | Candida glabrata | 0.3096715 | 3.116 | 0.53 | 4.79 |
| S625-C03 | CAG58441 | GENPEPT | Candida glabrata | 0.3371924 | 3.56 | 0.433 | 4.796 |
| S625-C06 | A0A202G702 | SWISSPROT | Clavispora lusitaniae | 0.3008664 | 3.02 | 0.543 | 4.736 |
| | | | (Candida lusitaniae) | | | | |
| S625-C09 | CAG87483 | GENPEPT | Debaryomyces hansenii | 0.3595092 | 2.732 | 0.562 | 4.796 |
| S625-C10 | D7KH13 | SWISSPROT | Arabidopsis lyrata subsp. Lyrata | 0.4508352 | 4.292 | 0.513 | 4.55 |
| S625-C11 | EFP12DWXL | AHGP | Spathaspora passalidarum | 0.4111762 | 3.812 | 0.495 | 4.808 |
| S625-D05 | A0A202G6Z7 | SWISSPROT | Clavispora lusitaniae | 0.298149 | 2.876 | 0.533 | 4.736 |
| | | | (Candida lusitaniae) | | | | |
| S625-D06 | A0A202G702 | SWISSPROT | Clavispora lusitaniae | 0.3208814 | 3.452 | 0.519 | 4.736 |
| | | | (Candida lusitaniae) | | | | |
| S625-D07 | A0A202G714 | SWISSPROT | Clavispora lusitaniae | 0.3050702 | 2.864 | 0.569 | 4.628 |
| | | | (Candida lusitaniae) | | | | |
| S625-E01 | C8TEF4 | TREMBL | Candida arabinofermentans | 0.3198353 | 3.236 | 0.478 | 4.736 |
| S625-E07 | A0A202G714 | SWISSPROT | Clavispora lusitaniae | 0.3019518 | 3.02 | 0.563 | 4.808 |
| | | | (Candida lusitaniae) | | | | |
| S625-E09 | CAG87483 | GENPEPT | Debaryomyces hansenii | 0.3138275 | 3.14 | 0.55 | 4.79 |
| S625-F02 | CAG57753 | GENPEPT | Candida glabrata | 0.2179967 | 2.852 | 0.49 | 4.748 |
| S625-F04 | CAG60202 | GENPEPT | Candida glabrata | 0.3717669 | 3.464 | 0 | 4.742 |
| S625-F10 | D7KH13 | SWISSPROT | Arabidopsis lyrata subsp. Lyrata | 0.4410499 | 4.328 | 0.585 | 4.7 |
| S625-G02 | CAG57753 | GENPEPT | Candida glabrata | 0.2625253 | 3.056 | 0.523 | 4.772 |
| S625-G03 | CAG58441 | GENPEPT | Candida glabrata | 0.348596 | 3.8 | 0.539 | 4.79 |
| S625-G04 | CAG60202 | GENPEPT | Candida glabrata | −0.0053626 | 0.056 | 0.566 | 0 |
| S625-G06 | A0A202G702 | SWISSPROT | Clavispora lusitaniae | 0.3377488 | 3.008 | 0.526 | 4.694 |
| | | | (Candida lusitaniae) | | | | |
| S625-G09 | CAG87483 | GENPEPT | Debaryomyces hansenii | 0.3629195 | 2.852 | 0.521 | 4.766 |
| S625-G10 | D7KH13 | SWISSPROT | Arabidopsis lyrata subsp. Lyrata | 0.4335384 | 4.34 | 0.58 | 4.76 |
| S625-H02 | CAG58441 | GENPEPT | Candida glabrata | 0.3719989 | 3.944 | 0.487 | 4.79 |
| S625-H04 | A0A202G6Z7 | SWISSPROT | Clavispora lusitaniae | 0.386876 | 3.272 | 0.559 | 4.718 |
| | | | (Candida lusitaniae) | | | | |
| S625-H06 | A0A202G702 | SWISSPROT | Clavispora lusitaniae | 0.3359639 | 3.596 | 0.52 | 4.724 |
| | | | (Candida lusitaniae) | | | | |
| S625-H09 | D7KH13 | SWISSPROT | Arabidopsis lyrata subsp. Lyrata | 0.4388982 | 4.64 | 0.531 | 4.796 |
| S625-H12 | EFP14W5DC | AHGP | Clavispora lusitaniae | −0.0021492 | 0.044 | 0.554 | 0 |
| S626-A01 | EFP1D9FNG | AHGP | Spathaspora arborariae | 0.3836988 | 3.908 | 0.511 | 5 |
| S626-A02 | EFP3FBKC6 | AHGP | Kluyveromyces marxianus | 0.3719001 | 3.908 | 0.566 | 4.73 |
| S626-A05 | C5DDE9 | TREMBL | Lachancea thermotolerans | 0.348118 | 2.936 | 0.478 | 4.712 |
| | | | (Kluyveromyces thermotolerans) | | | | |
| S626-A06 | EFPC7NHF4 | NZGP | Phytate as P enrichment B | 0.3309501 | 3.368 | 0.487 | 4.79 |
| S626-A07 | A0A0P1KWW5 | SWISSPROT | Lachancea quebecensis | 0.3830406 | 2.792 | 0.479 | 4.712 |
| S626-A08 | EFP5FS42L | AHGP | Candida sojae | 0.3399488 | 2.804 | 0.559 | 4.418 |
| S626-A10 | EFP5N972X | AHGP | Priceomyces haplophilus | 0.3577001 | 3.104 | 0.531 | 4.82 |
| S626-A12 | EFP5NR67S | AHGP | Candida carpophila | 0.3441407 | 3.284 | 0.55 | 4.76 |
| S626-B01 | EFP1D9FNG | AHGP | Spathaspora arborariae | 0.410607 | 3.944 | 0.507 | 4.79 |
| S626-B02 | EFP3FBKC6 | AHGP | Kluyveromyces marxianus | 0.2902997 | 2.972 | 0.532 | 4.718 |
| S626-B05 | C5DDE9 | TREMBL | Lachancea thermotolerans | 0.2664803 | 2.816 | 0.477 | 4.724 |
| | | | (Kluyveromyces thermotolerans) | | | | |
| S626-B06 | EFPC7NHF4 | NZGP | Phytate as P enrichment B | 0.3144973 | 2.756 | 0.49 | 4.784 |
| S626-B08 | EFP5FS42L | AHGP | Candida sojae | 0.415525 | 3.38 | 0.508 | 4.748 |
| S626-C02 | EFP3FBKC6 | AHGP | Kluyveromyces marxianus | 0.2870368 | 2.804 | 0.516 | 4.724 |
| S626-C03 | EFP3TVZL9 | NZGP | Ogataea methanolica | 0.4422794 | 3.44 | 0.538 | 4.706 |
| S626-C06 | EFPC7NHF4 | NZGP | Phytate as P enrichment B | 0.2997432 | 2.84 | 0.507 | 4.7 |
| S626-C07 | EFP7FXWPL | AHGP | Yarrowia galli | 0.2852328 | 2.768 | 0.53 | 4.748 |
| S626-C08 | A0A0P1KWW5 | SWISSPROT | Lachancea quebecensis | 0.3214082 | 2.468 | 0.522 | 4.742 |
| S626-C10 | EFP5N972X | AHGP | Priceomyces haplophilus | 0.3224425 | 3.332 | 0.569 | 4.784 |
| S626-D02 | EFP3FBKC6 | AHGP | Kluyveromyces marxianus | 0.264995 | 2.876 | 0.53 | 4.778 |
| S626-D05 | C5DDE9 | TREMBL | Lachancea thermotolerans | 0.2699201 | 2.84 | 0.398 | 4.676 |
| | | | (Kluyveromyces thermotolerans) | | | | |
| S626-D06 | EFPC7NHF4 | NZGP | Phytate as P enrichment B | 0.3071855 | 2.876 | 0.433 | 4.604 |
| S626-D07 | A0A0P1KWW5 | SWISSPROT | Lachancea quebecensis | 0.3113258 | 3.044 | 0.489 | 4.772 |
| S626-D08 | A0A0P1KWW5 | SWISSPROT | Lachancea quebecensis | 0.3547152 | 2.828 | 0.526 | 4.808 |
| S626-E02 | EFP3FBKC6 | AHGP | Kluyveromyces marxianus | 0.3072901 | 2.948 | 0.529 | 4.754 |
| S626-E03 | EFP3TVZL9 | NZGP | Ogataea methanolica | 0.3311183 | 2.552 | 0.514 | 4.742 |
| S626-E05 | C5DDE9 | TREMBL | Lachancea thermotolerans | 0.3992743 | 3.224 | 0.418 | 4.748 |
| | | | (Kluyveromyces thermotolerans) | | | | |
| S626-E06 | EFPC7NHF4 | NZGP | Phytate as P enrichment B | 0.269026 | 2.888 | 0.503 | 4.802 |
| S626-E07 | EFP7FXWPL | AHGP | Yarrowia galli | 0.3442749 | 3.068 | 0.563 | 4.808 |
| S626-E08 | A0A0P1KWW5 | SWISSPROT | Lachancea quebecensis | 0.2999467 | 2.972 | 0.533 | 4.808 |
| S626-E09 | EFP7FXWPL | AHGP | Yarrowia galli | 0.5353578 | 5 | 0.52 | 5 |
| S626-F02 | EFP3FBKC6 | AHGP | Kluyveromyces marxianus | 0.282295 | 2.912 | 0.557 | 4.736 |
| S626-F05 | C5DDE9 | TREMBL | Lachancea thermotolerans | 0.2788902 | 2.948 | 0.488 | 4.772 |
| | | | (Kluyveromyces thermotolerans) | | | | |
| S626-F06 | EFPC7NHF4 | NZGP | Phytate as P enrichment B | 0.3581 | 2.84 | 0.54 | 4.718 |
| S626-F07 | EFP7FXWPL | AHGP | Yarrowia galli | 0.3038494 | 2.816 | 0.535 | 4.808 |
| S626-F08 | A0A0P1KWW5 | SWISSPROT | Lachancea quebecensis | 0.3316429 | 2.996 | 0.517 | 4.76 |
| S626-F09 | EFP5FS42L | AHGP | Candida sojae | 0.3504822 | 4.196 | 0.515 | 4.556 |
| S626-F11 | EFP5NNT0L | AHGP | Wickerhamia fluorescens | 0.4123326 | 3.752 | 0.557 | 4.814 |
| S626-F12 | EFP5NR67S | AHGP | Candida carpophila | 0.3161864 | 3.248 | 0.513 | 4.772 |
| S626-G01 | EFP1D9FNG | AHGP | Spathaspora arborariae | 0.4445404 | 4.364 | 0.534 | 4.808 |
| S626-G05 | C5DDE9 | TREMBL | Lachancea thermotolerans | 0.3459753 | 3.116 | 0.49 | 4.808 |
| | | | (Kluyveromyces thermotolerans) | | | | |
| S626-G06 | EFPC7NHF4 | NZGP | Phytate as P enrichment B | 0.3096595 | 2.96 | 0.537 | 4.82 |
| S626-G07 | EFP7FXWPL | AHGP | Yarrowia galli | 0.3110631 | 2.984 | 0 | 4.76 |
| S626-G08 | A0A0P1KWW5 | SWISSPROT | Lachancea quebecensis | 0.3436644 | 2.9 | 0.543 | 4.814 |
| S626-G09 | EFP5FS42L | AHGP | Candida sojae | 0.6534965 | 5 | 0 | 4.808 |
| S626-G10 | EFP5N972X | AHGP | Priceomyces haplophilus | 0.2798032 | 2.648 | 0.517 | 4.778 |
| S626-G11 | EFP5NNT0L | AHGP | Wickerhamia fluorescens | 0.3974499 | 3.776 | 0.551 | 4.784 |
| S626-G12 | EFP5NR67S | AHGP | Candida carpophila | 0.3413135 | 3.356 | 0.524 | 4.652 |
| S626-H01 | EFP1D9FNG | AHGP | Spathaspora arborariae | 0.4248934 | 4.76 | 0.571 | 4.796 |
| S626-H02 | EFP3FBKC6 | AHGP | Kluyveromyces marxianus | 0.3332038 | 3.476 | 0.504 | 4.754 |
| S626-H05 | C5DDE9 | TREMBL | Lachancea thermotolerans | 0.3954762 | 3.26 | 0.523 | 4.73 |
| | | | (Kluyveromyces thermotolerans) | | | | |
| S626-H06 | EFPC7NHF4 | NZGP | Phytate as P enrichment B | 0.3592149 | 3.14 | 0.539 | 4.664 |
| S626-H07 | EFP7FXWPL | AHGP | Yarrowia galli | 0.2963875 | 2.72 | 0.566 | 4.742 |
| S626-H08 | A0A0P1KWW5 | SWISSPROT | Lachancea quebecensis | 0.3222558 | 3.128 | 0.519 | 4.73 |
| S627-A01 | EFP6PD54N | AHGP | Wickerhamomyces anomalus NRRL Y-366-8 | 0.2389499 | 3.356 | 0.585 | 4.742 |
| S627-A02 | EFP7FXX0N | AHGP | Yarrowia alimentaria | 0.3124194 | 2.768 | 0.553 | 4.79 |
| S627-A03 | EFP6RQ8JN | NZGP | Scheffersomyces stipitis | 0.3901355 | 3.728 | 0.505 | 4.766 |
| S627-A04 | EFP5QXT3D | AHGP | Yarrowia deformans | 0.2990597 | 2.984 | 0.529 | 4.772 |
| S627-A05 | EFP5NRP7F | AHGP | Candida carpophila | 0.3206118 | 2.84 | 0.514 | 4.7 |
| S627-A07 | EFP7J7B0Q | AHGP | Ilyonectria destructans | 0.4098684 | 4.28 | 0.512 | 4.736 |
| S627-A08 | EFP6BNQR8 | AHGP | Lachancea cidri | 0.3626695 | 3.44 | 0.505 | 4.688 |
| S627-A09 | EFP7HS9KT | AHGP | Sugiyamaella xylanicola | 0.3140772 | 3.416 | 0.538 | 4.736 |
| S627-A10 | EFP6RN7NJ | NZGP | Schwanniomyces occidentalis | 0.3673295 | 3.476 | 0.514 | 4.688 |
| S627-A11 | EFPN276J | AHGP | Kluyveromyces wickerhamii | 0.4077458 | 4.592 | 0.424 | 4.562 |
| S627-A12 | EFP7WSC34 | AHGP | Spathaspora boniae | 0.3671354 | 4.448 | 0.552 | 5 |
| S627-B01 | EFP6PD54N | AHGP | Wickerhamomyces anomalus NRRL Y-366-8 | 0.4247049 | 3.68 | 0.58 | 5 |
| S627-B03 | EFP6RQ8JN | NZGP | Scheffersomyces stipitis | 0.4255134 | 3.788 | 0.532 | 4.796 |
| S627-B04 | EFP5QXT3D | AHGP | Yarrowia deformans | 0.3095839 | 3.14 | 0.557 | 4.748 |
| S627-B05 | EFP5NRP7F | AHGP | Candida carpophila | 0.3536919 | 2.756 | 0.437 | 4.688 |
| S627-B08 | EFP6BNQR8 | AHGP | Lachancea cidri | 0.3144515 | 3.404 | 0.518 | 4.748 |
| S627-B09 | M5P6N0 | SWISSPROT | Bacillus sonorensis | 0.3710606 | 3.716 | 0.556 | 5 |
| S627-C01 | EFP6PD54N | AHGP | Wickerhamomyces anomalus NRRL Y-366-8 | 0.4256281 | 3.836 | 0.563 | 4.79 |
| S627-C02 | EFP7FXX0N | AHGP | Yarrowia alimentaria | 0.3160127 | 2.876 | 0.523 | 4.808 |
| S627-C03 | EFP6RQ8JN | NZGP | Scheffersomyces stipitis | 0.3294535 | 3.452 | 0.534 | 4.592 |
| S627-C04 | EFP5QXT3D | AHGP | Yarrowia deformans | 0.328909 | 3.08 | 0.504 | 4.778 |
| S627-C05 | EFP5NRP7F | AHGP | Candida carpophila | 0.3260983 | 3.176 | 0.527 | 4.73 |
| S627-C06 | EFP6T76PV | AHGP | Debaryomyces hansenii | 0.2816585 | 3.116 | 0.539 | 4.724 |
| S627-C07 | EFP7J7B0Q | AHGP | Ilyonectria destructans | 0.3392304 | 4.364 | 0.535 | 4.814 |
| S627-C08 | EFP6BNQR8 | AHGP | Lachancea cidri | 0.3348904 | 3.608 | 0.541 | 5 |
| S627-C09 | M5P6N0 | SWISSPROT | Bacillus sonorensis | 0.2851211 | 3.32 | 0.523 | 4.784 |
| S627-D01 | EFP6PD54N | AHGP | Wickerhamomyces anomalus NRRL Y-366-8 | 0.4056184 | 3.836 | 0.551 | 4.82 |
| S627-D02 | EFP7FXX0N | AHGP | Yarrowia alimentaria | 0.335375 | 3.068 | 0.545 | 5 |
| S627-D08 | EFP6BNRRN | AHGP | Lachancea cidri | 0.3724667 | 3.944 | 0.544 | 4.796 |
| S627-D09 | V4KEI8 | SWISSPROT | Eutrema salsugineum | 0.2510854 | 3.176 | 0.521 | 4.814 |
| | | | (Sisymbrium salsugineum) | | | | |
| S627-D10 | C5DHA8 | TREMBL | Lachancea thermotolerans | 0.3600077 | 3.908 | 0.496 | 4.784 |
| | | | (Kluyveromyces thermotolerans) | | | | |
| S627-D11 | EFPN276J | AHGP | Kluyveromyces wickerhamii | 0.488197 | 4.568 | 0.526 | 4.748 |
| S627-D12 | EFP7WSC34 | AHGP | Spathaspora boniae | 0.4247819 | 4.628 | 0.538 | 4.826 |
| S627-E01 | EFP6PD54N | AHGP | Wickerhamomyces anomalus NRRL Y-366-8 | 0.3911058 | 3.824 | 0.517 | 4.742 |
| S627-E02 | EFP7FXX0N | AHGP | Yarrowia alimentaria | 0.3400147 | 2.696 | 0.554 | 4.82 |
| S627-E03 | EFP6RQ8JN | NZGP | Scheffersomyces stipitis | 0.3386662 | 3.368 | 0.566 | 4.802 |
| S627-E06 | EFP6T76PV | AHGP | Debaryomyces hansenii | 0.3892144 | 3.284 | 0.482 | 4.772 |
| S627-E07 | EFP7J7B0Q | AHGP | Ilyonectria destructans | 0.4318408 | 4.316 | 0.519 | 5 |
| S627-E08 | EFP6BNQR8 | AHGP | Lachancea cidri | 0.3349506 | 3.356 | 0.534 | 5 |
| S627-E09 | M5P6N0 | SWISSPROT | Bacillus sonorensis | 0.3059135 | 3.296 | 0.544 | 4.772 |
| S627-E10 | C5DHA8 | TREMBL | Lachancea thermotolerans | 0.2923483 | 3.692 | 0.507 | 4.664 |
| | | | (Kluyveromyces thermotolerans) | | | | |
| S627-F01 | EFP6PD54N | AHGP | Wickerhamomyces anomalus NRRL Y-366-8 | 0.3292878 | 3.476 | 0.495 | 4.802 |
| S627-F02 | EFP7FXX0N | AHGP | Yarrowia alimentaria | 0.2954949 | 2.792 | 0.511 | 4.754 |
| S627-F03 | EFP6RQ8JN | NZGP | Scheffersomyces stipitis | 0.3801304 | 3.548 | 0.532 | 4.784 |
| S627-F04 | EFP5QXT3D | AHGP | Yarrowia deformans | 0.3117767 | 3.032 | 0.513 | 4.76 |
| S627-F06 | EFP6T76PV | AHGP | Debaryomyces hansenii | 0.3125684 | 3.5 | 0.509 | 4.82 |
| S627-F08 | EFP6BNQR8 | AHGP | Lachancea cidri | 0.3268411 | 3.44 | 0.568 | 4.826 |
| S627-F09 | M5P6N0 | SWISSPROT | Bacillus sonorensis | 0.3383721 | 3.548 | 0.466 | 4.646 |
| S627-F10 | C5DHA8 | TREMBL | Lachancea thermotolerans | 0.3058737 | 3.308 | 0.526 | 4.736 |
| | | | (Kluyveromyces thermotolerans) | | | | |
| S627-F11 | EFPN276J | AHGP | Kluyveromyces wickerhamii | 0.3829311 | 4.472 | 0.504 | 4.766 |
| S627-F12 | EFP7WSC34 | AHGP | Spathaspora boniae | 0.434199 | 4.952 | 0.499 | 4.796 |
| S627-G01 | EFP6PD54N | AHGP | Wickerhamomyces anomalus NRRL Y-366-8 | 0.4454809 | 3.992 | 0.451 | 4.772 |
| S627-G03 | EFP6RQ8JN | NZGP | Scheffersomyces stipitis | 0.3035672 | 3.44 | 0.516 | 4.802 |
| S627-G05 | EFP5NRP7F | AHGP | Candida carpophila | 0.3447082 | 2.756 | 0.53 | 4.73 |
| S627-G07 | EFP7J7B0Q | AHGP | Ilyonectria destructans | 0.3399558 | 3.74 | 0.557 | 5 |
| S627-G09 | M5P6N0 | SWISSPROT | Bacillus sonorensis | 0.1799801 | 2.612 | 0.529 | 4.664 |
| S627-G10 | C5DHA8 | TREMBL | Lachancea thermotolerans | 0.3450805 | 3.728 | 0.512 | 4.718 |
| | | | (Kluyveromyces thermotolerans) | | | | |
| S627-G11 | EFPN276J | AHGP | Kluyveromyces wickerhamii | 0.3135951 | 3.932 | 0.541 | 4.796 |
| S627-G12 | P49374 | SWISSPROT | Kluyveromyces lactis | 0.4695402 | 4.664 | 0.521 | 4.82 |
| | | | (Candida sphaerica) | | | | |
| S627-H01 | EFP6PD54N | AHGP | Wickerhamomyces anomalus NRRL Y-366-8 | 0.3672795 | 3.932 | 0.502 | 5 |
| S627-H02 | EFP7FXX0N | AHGP | Yarrowia alimentaria | 0.3367283 | 3.092 | 0.55 | 4.658 |
| S627-H04 | EFP5QXT3D | AHGP | Yarrowia deformans | 0.3051535 | 2.696 | 0.514 | 4.718 |
| S627-H06 | EFP6T76PV | AHGP | Debaryomyces hansenii | 0.2812393 | 3.284 | 0.524 | 4.742 |
| S627-H08 | EFP6BNQR8 | AHGP | Lachancea cidri | 0.35157 | 3.512 | 0.547 | 4.82 |
| S627-H09 | M5P6N0 | SWISSPROT | Bacillus sonorensis | 0.2849132 | 3.14 | 0.548 | 4.742 |
| S627-H10 | C5DHA8 | TREMBL | Lachancea thermotolerans | 0.3143899 | 3.308 | 0.547 | 4.814 |
| | | | (Kluyveromyces thermotolerans) | | | | |
| S627-H12 | EFP7WSC34 | AHGP | Spathaspora boniae | 0.3941195 | 4.112 | 0.558 | 5 |
| S628-A04 | EFP7FXWQF | AHGP | Yarrowia galli | 0.3549156 | 3.368 | 0.552 | 4.802 |
| S628-A05 | G8ZV29 | TREMBL | Torulaspora delbrueckii | 0.1746128 | 2.744 | 0.543 | 4.664 |
| | | | (Candida colliculosa) | | | | |
| S628-A08 | EFPB917WB | AHGP | Talaromyces adpressus | 0.2170824 | 3.116 | 0.572 | 4.718 |
| S628-A10 | EFPBZD7P6 | AHGP | Spathaspora sp. | 0.3356947 | 3.884 | 0.57 | 4.814 |
| S628-B02 | EFP8ZW2C9 | AHGP | Scheffersomyces stambukii | 0.4062289 | 4.448 | 0.581 | 5 |
| S628-C02 | EFP8ZW2C9 | AHGP | Scheffersomyces stambukii | 0.3988605 | 4.04 | 0.564 | 5 |
| S628-D02 | EFP8ZW2C9 | AHGP | Scheffersomyces stambukii | 0.3913848 | 4.364 | 0.55 | 4.82 |
| S628-D04 | EFP7FXWQF | AHGP | Yarrowia galli | 0.3393513 | 3.32 | 0.558 | 4.796 |
| S628-D05 | G8ZV29 | TREMBL | Torulaspora delbrueckii | 0.2987544 | 3.392 | 0.553 | 4.73 |
| | | | (Candida colliculosa) | | | | |
| S628-D06 | EFP6T73D9 | AHGP | Debaryomyces hansenii | 0.3294894 | 3.128 | 0.505 | 4.694 |
| S628-D07 | EFPB917WB | AHGP | Talaromyces adpressus | 0.2596833 | 3.248 | 0.547 | 4.7 |
| S628-D09 | EFPBZD7P6 | AHGP | Spathaspora sp. | 0.3956318 | 4.052 | 0.552 | 5 |
| S628-E03 | EFP9CLGNG | NZGP | Meyerozyma caribbica | 0.4031216 | 4.004 | 0.546 | 4.76 |
| S628-E04 | EFP7FXWQF | AHGP | Yarrowia galli | 0.3794871 | 3.512 | 0.574 | 4.748 |
| S628-E05 | G8ZV29 | TREMBL | Torulaspora delbrueckii | 0.3243947 | 3.38 | 0.547 | 4.784 |
| | | | (Candida colliculosa) | | | | |
| S628-E06 | EFP6T73D9 | AHGP | Debaryomyces hansenii | 0.333262 | 3.908 | 0.586 | 4.796 |
| S628-E07 | EFPB917WB | AHGP | Talaromyces adpressus | 0.2850768 | 3.368 | 0.546 | 4.694 |
| S628-E08 | EFPBZBQPC | AHGP | Metschnikowia fructicola | 0.4053061 | 4.34 | 0.54 | 4.742 |
| S628-E09 | EFPBZD7P6 | AHGP | Spathaspora sp. | 0.397786 | 4.4 | 0.51 | 4.712 |
| S628-F01 | CAG57753 | GENPEPT | Candida glabrata | 0.3230515 | 4.208 | 0.551 | 4.73 |
| S628-F05 | G8ZV29 | TREMBL | Torulaspora delbrueckii | 0.3387605 | 3.356 | 0.513 | 4.658 |
| | | | (Candida colliculosa) | | | | |
| S628-F06 | EFP6T73D9 | AHGP | Debaryomyces hansenii | 0.334762 | 3.356 | 0.545 | 4.784 |
| S628-F07 | EFPB917WB | AHGP | Talaromyces adpressus | 0.3125936 | 3.512 | 0.538 | 4.718 |
| S628-F08 | EFPBZBQPC | AHGP | Metschnikowia fructicola | 0.3727469 | 3.692 | 0.555 | 4.64 |
| S628-F11 | EFPL4075 | AHGP | Kluyveromyces aestuarii | 0.3582427 | 3.32 | 0.576 | 4.73 |
| S628-G06 | EFP6T73D9 | AHGP | Debaryomyces hansenii | 0.3060752 | 3.848 | 0.573 | 4.766 |
| S628-G10 | P39004 | SWISSPROT | Saccharomyces cerevisiae | 0.4065074 | 3.716 | 0.585 | 4.73 |
| S628-H07 | EFPB917WB | AHGP | Talaromyces adpressus | 0.2842459 | 3.296 | 0.518 | 4.742 |
| S628-H09 | EFPBZD7P6 | AHGP | Spathaspora sp. | 0.4673099 | 4.532 | 0.542 | 4.808 |
| S628-H11 | EFP7FXWHQ | AHGP | Candida phangngaensis | 0.3513347 | 3.272 | 0.548 | 4.778 |
| S629-A02 | EFP6BNRRN | AHGP | Lachancea cidri | 0.3684927 | 4.328 | 0.524 | 5 |
| S629-A03 | V4KEI8 | SWISSPROT | Eutrema salsugineum | 0.3757136 | 4.316 | 0.541 | 5 |
| | | | (Sisymbrium salsugineum) | | | | |
| S629-A04 | A0A0P1KXV6 | TREMBL | Lachancea quebecensis | 0.3534477 | 3.572 | 0.538 | 4.736 |
| S629-A06 | EFP5QNR84 | AHGP | Ambrosiozyma monospora | 0.4085733 | 5 | 0.507 | 5 |
| S629-A07 | A0A1Q2ZT88 | SWISSPROT | Zygosaccharomyces rouxii | 0.3123939 | 3.68 | 0.557 | 4.712 |
| | | | (Candida mogii) | | | | |
| S629-A08 | EFP5Q5H1L | AHGP | Ogataea methanolica | 0.3691541 | 3.068 | 0.551 | 4.802 |
| S629-A09 | A0A1G4MC24 | TREMBL | Lachancea fermentati | 0.3087557 | 3.344 | 0.558 | 4.742 |
| | | | (Zygosaccharomyces fermentati) | | | | |
| S629-A10 | J4U468 | TREMBL | Saccharomyces kudriavzevii | 0.3881162 | 3.464 | 0.513 | 4.802 |
| S629-B01 | EFPL4075 | AHGP | Kluyveromyces aestuarii | 0.2675191 | 3.2 | 0.536 | 4.646 |
| S629-B02 | EFP6BNRRN | AHGP | Lachancea cidri | 0.4160271 | 4.952 | 0.512 | 4.742 |
| S629-B03 | V4KEI8 | SWISSPROT | Eutrema salsugineum | 0.3826557 | 3.632 | 0.544 | 4.784 |
| | | | (Sisymbrium salsugineum) | | | | |
| S629-B04 | A0A0P1KXV6 | TREMBL | Lachancea quebecensis | 0.2628053 | 3.224 | 0.556 | 4.736 |
| S629-B06 | EFP5QNR84 | AHGP | Ambrosiozyma monospora | 0.4645669 | 5 | 0.526 | 4.712 |
| S629-B07 | A0A1Q2ZT88 | SWISSPROT | Zygosaccharomyces rouxii | 0.2565069 | 3.152 | 0.552 | 4.472 |
| | | | (Candida mogii) | | | | |
| S629-B08 | EFP5Q5H1L | AHGP | Ogataea methanolica | 0.3626641 | 3.116 | 0.581 | 5 |
| S629-C01 | R0GW82 | SWISSPROT | Capsella rubella | 0.3558343 | 4.784 | 0.56 | 4.766 |
| S629-C04 | A0A0P1KXV6 | TREMBL | Lachancea quebecensis | 0.3728305 | 3.332 | 0.523 | 4.79 |
| S629-C05 | EFP6RN7NJ | NZGP | Schwanniomyces occidentalis | 0.3465646 | 3.56 | 0.514 | 5 |
| S629-C06 | EFP5QNR84 | AHGP | Ambrosiozyma monospora | 0.4770512 | 5 | 0.512 | 5 |
| S629-C07 | A0A1Q2ZT88 | SWISSPROT | Zygosaccharomyces rouxii | 0.2838372 | 3.212 | 0.538 | 4.79 |
| | | | (Candida mogii) | | | | |
| S629-C10 | EFP7G7KNB | AHGP | Saccharomycopsis fibuligera | 0.3184938 | 3.464 | 0.53 | 4.784 |
| S629-D03 | V4KEI8 | SWISSPROT | Eutrema salsugineum | 0.334514 | 3.548 | 0.534 | 4.718 |
| | | | (Sisymbrium salsugineum) | | | | |
| S629-D06 | EFP5QNR84 | AHGP | Ambrosiozyma monospora | 0.4964815 | 5 | 0.547 | 4.79 |
| S629-D07 | A0A1Q2ZT88 | SWISSPROT | Zygosaccharomyces rouxii | 0.3254843 | 3.032 | 0.499 | 4.4 |
| | | | (Candida mogii) | | | | |
| S629-D08 | EFP5Q5H1L | AHGP | Ogataea methanolica | 0.2463679 | 2.792 | 0.55 | 4.73 |
| S629-D09 | A0A1G4MC24 | TREMBL | Lachancea fermentati | 0.3463687 | 3.356 | 0.574 | 4.832 |
| | | | (Zygosaccharomyces fermentati) | | | | |
| S629-D10 | EFP7G7KNB | AHGP | Saccharomycopsis fibuligera | 0.3283284 | 3.38 | 0.505 | 4.832 |
| S629-E01 | R0GW82 | SWISSPROT | Capsella rubella | 0.3990959 | 4.736 | 0.552 | 4.802 |
| S629-E02 | EFP6BNRRN | AHGP | Lachancea cidri | 0.3003438 | 4.016 | 0.557 | 4.808 |
| S629-E03 | V4KEI8 | SWISSPROT | Eutrema salsugineum | 0.3731774 | 4.364 | 0.568 | 4.466 |
| | | | (Sisymbrium salsugineum) | | | | |
| S629-E04 | A0A0P1KXV6 | TREMBL | Lachancea quebecensis | 0.1828722 | 2.792 | 0.521 | 4.766 |
| S629-E06 | EFP5QNR84 | AHGP | Ambrosiozyma monospora | 0.4183418 | 5 | 0.424 | 5 |
| S629-E07 | A0A1Q2ZT88 | SWISSPROT | Zygosaccharomyces rouxii | 0.336168 | 3.296 | 0.521 | 5 |
| | | | (Candida mogii) | | | | |
| S629-E08 | EFP5Q5H1L | AHGP | Ogataea methanolica | 0.2575524 | 2.708 | 0.547 | 4.664 |
| S629-E09 | A0A1G4MC24 | TREMBL | Lachancea fermentati | 0.2415466 | 3.056 | 0.564 | 4.688 |
| | | | (Zygosaccharomyces fermentati) | | | | |
| S629-E10 | EFP7G7KNB | AHGP | Saccharomycopsis fibuligera | 0.3400576 | 3.44 | 0.586 | 4.802 |
| S629-F01 | R0GW82 | SWISSPROT | Capsella rubella | 0.1829044 | 3.128 | 0.482 | 4.694 |
| S629-F03 | V4KEI8 | SWISSPROT | Eutrema salsugineum | 0.4472193 | 4.112 | 0.551 | 4.712 |
| | | | (Sisymbrium salsugineum) | | | | |
| S629-F06 | EFP5QNR84 | AHGP | Ambrosiozyma monospora | 0.4344536 | 5 | 0.526 | 4.826 |
| S629-F07 | A0A1Q2ZT88 | SWISSPROT | Zygosaccharomyces rouxii | 0.3915323 | 3.644 | 0.558 | 4.802 |
| | | | (Candida mogii) | | | | |
| S629-F08 | EFP5Q5H1L | AHGP | Ogataea methanolica | 0.4105202 | 3.584 | 0.546 | 4.7 |
| S629-F09 | A0A1G4MC24 | TREMBL | Lachancea fermentati | 0.276406 | 3.104 | 0.543 | 4.718 |
| | | | (Zygosaccharomyces fermentati) | | | | |
| S629-F10 | EFP7G7KNB | AHGP | Saccharomycopsis fibuligera | 0.3386973 | 3.368 | 0.545 | 4.73 |
| S629-G02 | EFP6BNRRN | AHGP | Lachancea cidri | 0.416067 | 5 | 0.505 | 4.778 |
| S629-G03 | V4KEI8 | SWISSPROT | Eutrema salsugineum | 0.4167335 | 3.824 | 0.547 | 5 |
| | | | (Sisymbrium salsugineum) | | | | |
| S629-G04 | A0A0P1KXV6 | TREMBL | Lachancea quebecensis | 0.3373712 | 3.344 | 0.544 | 4.754 |
| S629-G05 | EFP6RN7NJ | NZGP | Schwanniomyces occidentalis | 0.336727 | 3.464 | 0.496 | 4.742 |
| S629-G06 | EFP5QNR84 | AHGP | Ambrosiozyma monospora | 0.4207392 | 5 | 0.504 | 5 |
| S629-G07 | A0A1Q2ZT88 | SWISSPROT | Zygosaccharomyces rouxii | 0.2210438 | 3.008 | 0.519 | 4.766 |
| | | | (Candida mogii) | | | | |
| S629-G08 | EFP5Q5H1L | AHGP | Ogataea methanolica | 0.3466536 | 3.2 | 0.552 | 4.772 |
| S629-G09 | A0A1G4MC24 | TREMBL | Lachancea fermentati | 0.3040876 | 3.116 | 0.553 | 4.766 |
| | | | (Zygosaccharomyces fermentati) | | | | |
| S629-G10 | EFP7G7KNB | AHGP | Saccharomycopsis fibuligera | 0.306382 | 3.284 | 0.573 | 4.73 |
| S629-H01 | R0GW82 | SWISSPROT | Capsella rubella | 0.3887375 | 5 | 0.509 | 4.478 |
| S629-H02 | EFP6BNRRN | AHGP | Lachancea cidri | 0.4163048 | 4.748 | 0.518 | 4.736 |
| S629-H04 | A0A0P1KXV6 | TREMBL | Lachancea quebecensis | 0.3473167 | 3.356 | 0.466 | 4.574 |
| S629-H06 | EFP5QNR84 | AHGP | Ambrosiozyma monospora | 0.5132886 | 5 | 0.541 | 4.688 |
| S629-H07 | A0A1Q2ZT88 | SWISSPROT | Zygosaccharomyces rouxii | 0.3773637 | 3.632 | 0.52 | 4.706 |
| | | | (Candida mogii) | | | | |
| S629-H09 | A0A1G4MC24 | TREMBL | Lachancea fermentati | 0.3183343 | 3.212 | 0.547 | 5 |
| | | | (Zygosaccharomyces fermentati) | | | | |
| S629-H10 | EFP7G7KNB | AHGP | Saccharomycopsis fibuligera | 0.3286604 | 3.392 | 0.547 | 4.778 |
| S642-A01 | A0A0L9VMD5 | SWISSPROT | Phaseolus angularis | 0.3623247 | 3.584 | 0.546 | 4.832 |
| | | | (Vigna angularis) | | | | |
| S642-A05 | K0KRN7 | SWISSPROT | Wickerhamomyces ciferrii | 0.3066395 | 3.248 | 0.559 | 4.808 |
| | | | (Pichia ciferrii) | | | | |
| S642-A07 | P40885 | SWISSPROT | Saccharomyces cerevisiae | 0.3043919 | 3.152 | 0.512 | 5 |
| S642-A08 | A0A1U9X406 | SWISSPROT | Pisum sativum | 0.3215425 | 1.496 | 0.505 | 4.802 |
| S642-A10 | EFP9SKDNC | NZGP | Penicillium tularense | 0.3568236 | 3.584 | 0.523 | 4.778 |
| S642-B05 | K0KRN7 | SWISSPROT | Wickerhamomyces ciferrii | 0.3143539 | 3.308 | 0.576 | 4.802 |
| | | | (Pichia ciferrii) | | | | |
| S642-B08 | A0A1U9X406 | SWISSPROT | Pisum sativum | 0.3785406 | 3.032 | 0.518 | 4.742 |
| S642-B09 | K9FYP3 | SWISSPROT | Penicillium digitatum | 0.4737424 | 5 | 0.568 | 5 |
| S642-B11 | EFP8DZ469 | AHGP | Torulaspora microellipsoides | 0.3729545 | 3.728 | 0.514 | 5 |
| S642-C01 | BA092398 | GENESEQP | Penicillium chrysogenum | 0.3279053 | 4.208 | 0.522 | 4.742 |
| S642-C03 | EFP401CL1 | NZGP | Penicillium vulpinum | 0.3921512 | 4.424 | 0.542 | 5 |
| S642-C04 | A0A0A8KZI3 | SWISSPROT | Kluyveromyces dobzhanskii | 0.4418333 | 4.568 | 0.57 | 4.424 |
| S642-C05 | K0KRN7 | SWISSPROT | Wickerhamomyces ciferrii | 0.3196028 | 3.68 | 0.542 | 4.826 |
| | | | (Pichia ciferrii) | | | | |
| S642-D01 | A0A0L9VMD5 | SWISSPROT | Phaseolus angularis | 0.3495611 | 3.356 | 0.518 | 4.76 |
| | | | (Vigna angularis) | | | | |
| S642-D02 | BA092398 | GENESEQP | Penicillium chrysogenum | 0.516172 | 5 | 0.54 | 4.652 |
| S642-D05 | K0KRN7 | SWISSPROT | Wickerhamomyces ciferrii | 0.2879234 | 3.2 | 0.548 | 4.706 |
| | | | (Pichia ciferrii) | | | | |
| S642-D07 | P40885 | SWISSPROT | Saccharomyces cerevisiae | 0.3588446 | 3.236 | 0.535 | 4.688 |
| S642-D09 | K9FYP3 | SWISSPROT | Penicillium digitatum | 0.2010501 | 3.26 | 0.551 | 4.724 |
| S642-D10 | EFP9SKDNC | NZGP | Penicillium tularense | 0.3586858 | 3.848 | 0.521 | 4.778 |
| S642-D11 | EFP8DZ469 | AHGP | Torulaspora microellipsoides | 0.3514168 | 3.5 | 0.496 | 4.79 |
| S642-E02 | BA092398 | GENESEQP | Penicillium chrysogenum | 0.6238107 | 5 | 0.555 | 5 |
| S642-E03 | EFP401CL1 | NZGP | Penicillium vulpinum | 0.3650241 | 3.908 | 0.51 | 5 |
| S642-E07 | P40885 | SWISSPROT | Saccharomyces cerevisiae | 0.3760686 | 3.26 | 0.519 | 4.82 |
| S642-E08 | A0A1U9X406 | SWISSPROT | Pisum sativum | 0.3079204 | 2.984 | 0.544 | 4.784 |
| S642-E09 | K9FYP3 | SWISSPROT | Penicillium digitatum | 0.587445 | 5 | 0.547 | 4.808 |
| S642-E11 | EFP8DZ469 | AHGP | Torulaspora microellipsoides | 0.2722842 | 3.164 | 0.507 | 5 |
| S642-F07 | P40885 | SWISSPROT | Saccharomyces cerevisiae | 0.4095371 | 3.476 | 0.557 | 4.796 |
| S642-F11 | EFP8DZ469 | AHGP | Torulaspora microellipsoides | 0.3929808 | 3.728 | 0.526 | 4.802 |
| S642-G03 | EFPL4075 | AHGP | Kluyveromyces aestuarii | 0.3496731 | 3.38 | 0.504 | 4.826 |
| S642-G05 | K0KRN7 | SWISSPROT | Wickerhamomyces ciferrii | 0.2993671 | 3.356 | 0.536 | 4.652 |
| | | | (Pichia ciferrii) | | | | |
| S642-G09 | K9FYP3 | SWISSPROT | Penicillium digitatum | 0.3605162 | 5 | 0.538 | 4.784 |
| S642-G10 | EFP9SKDNC | NZGP | Penicillium tularense | 0.3324987 | 3.62 | 0.466 | 4.808 |
| S642-G11 | EFP8DZ469 | AHGP | Torulaspora microellipsoides | 0.3772988 | 3.8 | 0.512 | 4.79 |
| S642-H03 | EFP401CL1 | NZGP | Penicillium vulpinum | 0.3964691 | 3.716 | 0.538 | 4.676 |
| S642-H04 | K0KRN7 | SWISSPROT | Wickerhamomyces ciferrii | 0.3016011 | 3.248 | 0.51 | 4.814 |
| | | | (Pichia ciferrii) | | | | |
| S642-H05 | K0KRN7 | SWISSPROT | Wickerhamomyces ciferrii | 0.3958623 | 3.62 | 0.56 | 4.814 |
| | | | (Pichia ciferrii) | | | | |
| S642-H06 | A0A0N7MLX3 | TREMBL | Lachancea quebecensis | 0.3310281 | 3.188 | 0.524 | 5 |
| S642-H07 | P40885 | SWISSPROT | Saccharomyces cerevisiae | 0.2783827 | 3.332 | 0.525 | 5 |
| S642-H09 | K9FYP3 | SWISSPROT | Penicillium digitatum | 0.3964429 | 5 | 0.556 | 4.682 |
| S643-A06 | Q6CG69 | SWISSPROT | Yarrowia lipolytica | 0.2407538 | 2.324 | 0.558 | 4.826 |
| | | | (Candida lipolytica) | | | | |
| S643-A07 | AAT95983 | GENPEPT | Torulaspora delbrueckii | 0.3054765 | 2.9 | 0.53 | 4.802 |
| S643-A10 | A0A371ENF9 | TREMBL | Mucuna pruriens | 0.2962377 | 2.816 | 0.504 | 4.796 |
| S643-B04 | A3DSX4 | TREMBL | Phaseolus vulgaris | 0.3158349 | 3.104 | 0.558 | 4.754 |
| S643-B05 | EFP1CHF3L5 | NZGP | Penicillium brevicompactum | 0.1393603 | 2.504 | 0.55 | 4.706 |
| S643-B06 | Q6CG69 | SWISSPROT | Yarrowia lipolytica | 0.3325211 | 3.044 | 0.574 | 5 |
| | | | (Candida lipolytica) | | | | |
| S643-B07 | AAT95983 | GENPEPT | Torulaspora delbrueckii | 0.3066138 | 2.816 | 0.505 | 4.796 |
| S643-B08 | EFP70FSPD | NZGP | Saccharomyces cerevisiae | 0.2613837 | 3.056 | 0.538 | 4.772 |
| S643-B11 | EFPL4075 | AHGP | Kluyveromyces aestuarii | 0.3554258 | 3.656 | 0.51 | 5 |
| S643-C03 | P49374 | SWISSPROT | Kluyveromyces lactis | 0.3765046 | 3.896 | 0.499 | 4.79 |
| | | | (Candida sphaerica) | | | | |
| S643-C04 | A3DSX4 | TREMBL | Phaseolus vulgaris | 0.3087604 | 2.936 | 0.519 | 4.808 |
| S643-C05 | EFP1CHF3L5 | NZGP | Penicillium brevicompactum | 0.4645332 | 5 | 0.547 | 4.736 |
| S643-C07 | AAT95983 | GENPEPT | Torulaspora delbrueckii | 0.3329219 | 3.116 | 0.586 | 4.796 |
| S643-C10 | A0A371ENF9 | TREMBL | Mucuna pruriens | 0.3382588 | 2.96 | 0.538 | 4.808 |
| S643-D11 | EFPL4075 | AHGP | Kluyveromyces aestuarii | 0.3842494 | 3.572 | 0.559 | 4.82 |
| S643-E04 | A3DSX4 | TREMBL | Phaseolus vulgaris | 0.2564662 | 2.816 | 0.551 | 4.736 |
| S643-E08 | EFP70FSPD | NZGP | Saccharomyces cerevisiae | 0.2712773 | 2.54 | 0.518 | 4.802 |
| S643-E10 | A0A371ENF9 | TREMBL | Mucuna pruriens | 0.3370063 | 3.008 | 0.57 | 4.808 |
| S643-E11 | EFPL4075 | AHGP | Kluyveromyces aestuarii | 0.3551094 | 3.368 | 0.576 | 4.73 |
| S643-F02 | A0A1S2Z5S7 | SWISSPROT | Cicer arietinum | 0.2724876 | 3.032 | 0.552 | 4.796 |
| S643-F04 | EFP8ZW2C9 | AHGP | Scheffersomyces stambukii | 0.3449525 | 3.14 | 0.581 | 4.808 |
| S643-F06 | Q6CG69 | SWISSPROT | Yarrowia lipolytica | 0.2598887 | 2.852 | 0.553 | 4.808 |
| | | | (Candida lipolytica) | | | | |
| S643-F07 | EFP70FSPD | NZGP | Saccharomyces cerevisiae | 0.3208742 | 2.984 | 0.545 | 4.82 |
| S643-F08 | EFP70FSPD | NZGP | Saccharomyces cerevisiae | 0.2769906 | 2.648 | 0.572 | 4.76 |
| S643-G04 | A3DSX4 | TREMBL | Phaseolus vulgaris | 0.3467262 | 3.152 | 0.564 | 4.748 |
| S643-G07 | AAT95983 | GENPEPT | Torulaspora delbrueckii | 0.4204522 | 4.232 | 0.573 | 4.814 |
| S643-G08 | EFP70FSPD | NZGP | Saccharomyces cerevisiae | 0.3330312 | 2.804 | 0.57 | 4.7 |
| S643-H06 | Q6CG69 | SWISSPROT | Yarrowia lipolytica | 0.3295576 | 3.248 | 0.513 | 4.826 |
| | | | (Candida lipolytica) | | | | |
| S643-H07 | AAT95983 | GENPEPT | Torulaspora delbrueckii | 0.3776705 | 3.236 | 0.547 | 5 |
| S643-H10 | A0A371ENF9 | TREMBL | Mucuna pruriens | 0.2445174 | 1.856 | 0.585 | 4.724 |
| S643-H11 | EFPL4075 | AHGP | Kluyveromyces aestuarii | 0.3843023 | 3.656 | 0.536 | 4.82 |
| S644-A01 | P43581 | SWISSPROT | Saccharomyces cerevisiae | 0.3582082 | 3.296 | 0.56 | 5 |
| S644-A02 | EFP5QXVB6 | AHGP | Yarrowia deformans | 0.2941795 | 3.212 | 0.512 | 4.736 |
| S644-A04 | J5S3S1 | TREMBL | Saccharomyces kudriavzevii | 0.2922744 | 3.332 | 0.556 | 4.61 |
| S644-A10 | G3AF26 | TREMBL | Spathaspora passalidarum | 0.4132226 | 4.904 | 0.553 | 4.682 |
| S644-A11 | EFPBZZ6M7 | AHGP | Zygosaccharomyces kombuchaensis | 0.3777841 | 3.704 | 0.586 | 4.712 |
| S644-B01 | P43581 | SWISSPROT | Saccharomyces cerevisiae | 0.2359901 | 2.432 | 0.552 | 4.778 |
| S644-B04 | J5S3S1 | TREMBL | Saccharomyces kudriavzevii | 0.2557415 | 3.068 | 0.523 | 5 |
| S644-B09 | Q9LNV3 | SWISSPROT | Arabidopsis thaliana | 0.4382488 | 5 | 0.546 | 4.22 |
| S644-C02 | EFP5QXVB6 | AHGP | Yarrowia deformans | 0.2310544 | 2.912 | 0.519 | 5 |
| S644-C03 | EFP7HS9KT | AHGP | Sugiyamaella xylanicola | 0.2684057 | 2.828 | 0.544 | 4.73 |
| S644-C04 | J5S3S1 | TREMBL | Saccharomyces kudriavzevii | 0.2918369 | 2.996 | 0.521 | 4.718 |
| S644-C09 | Q9LNV3 | SWISSPROT | Arabidopsis thaliana | 0.5601625 | 5 | 0.552 | 4.466 |
| S644-C12 | B2G4F7 | SWISSPROT | Zygosaccharomyces rouxii | 0.4005432 | 4.124 | 0.518 | 5 |
| | | | (Candida mogii) | | | | |
| S644-D01 | P43581 | SWISSPROT | Saccharomyces cerevisiae | 0.3160571 | 2.528 | 0.482 | 4.682 |
| S644-D02 | EFP5QXVB6 | AHGP | Yarrowia deformans | 0.3411362 | 3.26 | 0.557 | 5 |
| S644-D09 | Q9LNV3 | SWISSPROT | Arabidopsis thaliana | 0.3689273 | 5 | 0.558 | 4.604 |
| S644-E04 | J5S3S1 | TREMBL | Saccharomyces kudriavzevii | 0.2911174 | 2.66 | 0.544 | 4.742 |
| S644-F04 | J5S3S1 | TREMBL | Saccharomyces kudriavzevii | 0.2935457 | 3.164 | 0.466 | 5 |
| S644-F09 | Q9LNV3 | SWISSPROT | Arabidopsis thaliana | 0.5917417 | 5 | 0.564 | 4.394 |
| S644-G02 | EFP7HS9KT | AHGP | Sugiyamaella xylanicola | 0.3253088 | 3.116 | 0.505 | 4.742 |
| S644-G03 | EFP7HS9KT | AHGP | Sugiyamaella xylanicola | 0.4172602 | 3.152 | 0.547 | 4.82 |
| S644-G10 | G3AF26 | TREMBL | Spathaspora passalidarum | 0.5893462 | 5 | 0.53 | 4.772 |
| S644-H02 | EFP5QXVB6 | AHGP | Yarrowia deformans | 0.2715584 | 2.804 | 0.518 | 4.55 |
| S644-H03 | EFP7HS9KT | AHGP | Sugiyamaella xylanicola | 0.3098324 | 3.092 | 0.538 | 4.634 |
| S645-B07 | K0KRN7 | SWISSPROT | Wickerhamomyces ciferrii | 0.3790369 | 3.224 | 0.548 | 4.634 |
| | | | (Pichia ciferrii) | | | | |
| S645-D06 | EFP7FXX0V | AHGP | Yarrowia alimentaria | 0.2302682 | 2.96 | 0.576 | 1.502 |
| S645-E06 | EFP7FXX0V | AHGP | Yarrowia alimentaria | 0.379333 | 3.752 | 0.542 | 1.67 |

[0844] This study shows that sugar transporter genes expressed in S509-C04 background strains comprising an active pentose pathway increases overall arabinose uptake. Approximately 80% of strains evaluated in this campaign showed improved growth rate and arabinose consumption compared to parent strain S509-C04. The following sugar transporter genes show highest affect in arabinose consumption: A0A078DBU3 (SEQ ID NO: 111), A1C8W7 (SEQ ID NO: 131), B1HOU6 (SEQ ID NO: 123), B6HE12 (SEQ ID NO: 108), D7KH13 (SEQ ID NO: 99), EFP1D9FNG (SEQ ID NO: 63), EFP4VJQD (SEQ ID NO: 72), EFP5FS42L (SEQ ID NO: 53), EFP6BNRRN (SEQ ID NO: 40) and K9FYP3 (SEQ ID NO: 124).

[0845] In comparison to parent strain S509-C04, some strains showed improved levels in growth and xylose consumption. Some genes that contributed to arabinose consumption also may assist in the uptake of xylose. Since most strains showed close to complete consumption of xylose, the following genes are identified with strains that showed higher growth rate when grown in xylose: A5DPY9 (SEQ ID NO: 116), A0A1L0BZU1 (SEQ ID NO: 138) and A1DAC2 (SEQ ID NO: 97).

### Example 3

### Construction of Yeast Strains with FPS1 and GPD1 Deletions, and Expressing GapN

### Deletion of FPS1 in Yeast Strain MEJI797

[0846] The S. cerevisiae strain MEJI797 (strain MBG5012 of WO2019/161227 further expressing the glucoamylase of SEQ ID NO: 229 and the alpha-amylase of SEQ ID NO: 130) was transformed with the annealed primers 1231855 and 1231856 (infra). To aid homologous recombination of the annealed primers at the FPS1 locus, a plasmid containing the nuclease MAD7 and a guide RNA specific to FPS1, pMLBA814 (FIG. 4), was also used in the transformation. Annealed primers 1231855 and 1231856 and pMLBA814 were transformed into the S. cerevisiae strain MEJI797 following a yeast electroporation protocol. Transformants were selected on YPD+cloNAT to select for colonies that contain the MAD7 plasmid pMLBA814. Sixteen transformants were picked onto YPD (2% glucose) solid medium.

[0847] Deletion of FPS1 was verified by PCR with locus specific primers 1231853 and 1231854 (infra) which anneal outside of the coding sequence for FPS1. Of the 16 transformants tested, all tested strains were deleted for FPS1. One of these transformants was chosen and designated S840-A03. The S. cerevisiae strain S840-A03 was passaged in YPD (2% glucose) liquid culture to facilitate removal of the MAD7 plasmid pMLBA814. After growth in liquid culture, individual colonies were isolated on YPD (2% glucose) solid medium. Sixteen individual colonies were picked onto YPD+cloNAT solid medium and YPD (2% glucose) solid medium. All cloNAT sensitive colonies were pooled together to make a culture of S840-A03 free of the MAD7 plasmid pMLBA814. S840-A03 is deleted for FPS1 in the S. cerevisiae strain MEJI797.

### Construction of the X-3 5′ Homology and Promoter HOR7 Containing Fragment (Fragment 1)

[0848] Synthetic DNA containing 500 bps homology to the X-3 site and the S. cerevisiae promoter HOR7 was synthesized by Thermo Fisher Scientific and designated HP13. Primers 1230181+1230203 (infra) were used to amplify HP13 resulting in a 1200 bps linear DNA fragment used for transformation.

### Construction of the NADP⁺ Dependent Glyceraldehyde 3-Phosphate Dehydrogenase (GapN, Q59931) Containing Fragment (Fragment 2)

[0849] Fragment 2 contained 50 bps 3′ S. cerevisiae HOR7 promoter, the NADP⁺ dependent glyceraldehyde 3-phosphate dehydrogenase (GapN, Q59931), the S. cerevisiae TEF1 terminator, and 500 bps homology to the X-3 site. The DNA sequence containing these features was PCR amplified from a yeast strain that had been previously engineered with these elements called S789-A06 using primers 1232910 and 1230928 (infra). This resulted in a 2000 bps linear DNA fragment used for transformation.

Integration of Linear Fragments to Generate a Yeast with Heterologous Expression of GapN (Q59931)

[0850] The S. cerevisiae strain S840-A03 was transformed with fragments 1 and 2 described above. To aid homologous recombination of the 2 fragments at the genomic site X-3 a plasmid containing the nuclease MAD7 and a guide RNA specific to X-3 (pMLBA647; FIG. 5) was also used in the transformation. Fragments 1, 2, and pMLBA647 were transformed into the into the S. cerevisiae strain S840-A03 following a yeast electroporation protocol. Transformants were selected on YPD+cloNAT to select for colonies that contain the MAD7 plasmid pMLBA647. Eight transformants were picked onto YPD (2% glucose) solid medium. Integration of the GapN (Q59931) expression cassette at X-3 was verified by PCR with locus specific primers and subsequent sequence analysis. Primers 1218020+1230932 (infra) amplify a 3600 bps fragment if the GapN (Q59931) expression cassette is inserted at X-3, and would amplify a 1500 bps fragment for the wildtype locus. Four of the eight transformants picked contained the correct sequence at X-3 for integration of fragments 1 and 2. One of these transformants was kept and designated MLBA1040. The S. cerevisiae strain MLBA1040 was passaged in YPD (2% glucose) liquid culture to facilitate removal of the MAD7 plasmid pMLBA647. After growth in liquid culture, individual colonies were isolated on YPD (2% glucose) solid medium. Sixteen individual colonies were picked onto YPD+cloNAT solid medium and YPD (2% glucose) solid medium. All cloNAT sensitive colonies were pooled together to make a culture of MLBA1040 free of the MAD7 plasmid pMLBA647. MLBA1040 is deleted for FPS1 and expresses GapN (Q59931) at X-3 in the S. cerevisiae strain MEJI797.

### Deletion of GPD1 in Yeast Strain MLBA1040

[0851] The S. cerevisiae strain MLBA1040 was transformed with the annealed primers 1231388 and 1231389 (infra) to delete GPD1. To aid homologous recombination of the annealed primers at the GPD1 locus, a plasmid containing the nuclease MAD7 and a guide RNA specific to GPD1, pJDIN171 (FIG. 6), was also used in the transformation. Annealed primers 1231388/1231389 (infra) and pJDIN171 were transformed into the S. cerevisiae strain MLBA1040 following a yeast electroporation protocol. Transformants were selected on YPD+cloNAT to select for colonies that contain the MAD7 plasmid pJDIN171. Eight transformants were picked onto YPD (2% glucose) solid medium. Deletion of GPD1 was verified by PCR with locus specific primers. Primers 1231386 and 1231387 anneal outside of the coding sequence for GPD1. All eight transformants were deleted for GPD1 as determined by PCR. One of these was kept and designated S859-C01, and was deleted for both GPD1 and FPS1 and expresses GapN (Q59931) at the X-3 locus in the S. cerevisiae strain MEJI797.

TABLE 8
Primers used in this example.

| | SEQ ID | |
|---|---|---|
| Primer | NO. | Sequence |
| 1231388 | 469 | TGTACACCCC CCCCCTCCAC AAACACAAAT ATTGATAATA |
| | | TAAAGATTTA TTGGAGAAAG ATAACATATC ATACTTTCCC |
| | | CCACTTTTTT |
| 1231389 | 470 | AAAAAAGTGG GGGAAAGTAT GATATGTTAT CTTTCTCCAA |
| | | TAAATCTTTA TATTATCAAT ATTTGTGTTT GTGGAGGGGG |
| | | GGGGTGTACA |
| 1230181 | 471 | AACGACAGCA CAAAGGAACT TTCAC |
| 1230203 | 472 | TTTTTATTAT TAGTCTTTTT TTTTTTTTGA CAATATCTGT ATGATTTG |
| 1232910 | 473 | ATCAAATCAT ACAGATATTG TCAAAAAAAA AAAAAGACTA |
| | | ATAATAAAAA ATGACCAAGC AGTATAAGAA CTATGTAAAC GG |
| 1230928 | 474 | GGCTACTGAT TTTGTTAAGC AACTCATCAAG |
| 1231853 | 475 | AGATTGCCCG GCCCTTTTTG |
| 1231854 | 476 | AGGTGACCAG GCTGAGTTCA TG |
| 1231855 | 477 | TACCAAGTAC GCTCGAGGGT ACATTCTAAT GCATTAAAAG |
| | | ACATGTGAGA AAGCAGGCAA GAAAAAGAAA CAAATAATAT |
| | | AGACTGATAG |
| 1231856 | 478 | CTATCAGTCT ATATTATTTG TTTCTTTTTC TTGCCTGCTT |
| | | TCTCACATGT CTTTTAATGC ATTAGAATGT ACCCTCGAGC |
| | | GTACTTGGTA |
| 1231386 | 479 | CATTCCATTC ACATATCGTC TTTGGCC |
| 1231387 | 480 | CACATCTGAA ATCATCGTAA GGAACTTTG |
| 1218020 | 481 | GAGATGGCCT ATTGATATCA AG |
| 1230932 | 482 | GCATTCACCT AAATAGGTAC TGCTCTATTA ATACAG |

### Example 4

### Construction of Yeast Strains with an Active Pentose Fermentation Pathway and Expressing a Heterologous Sugar Transporter in Host S859-C01 (Deleted for FPS1, GPD1, Expressing GapN)

[0852] This example describes the construction of yeast cells expressing an active pentose fermentation pathway and heterologous sugar transporter. DNA fragments were designed to allow for homologous recombination into the XII-2 and INT1 locus of the yeast S859-C01. The resulting strains had the five gene pentose utilization pathway (XR, LAD, LXR, XDH, and XK) at the XII-2 locus and the sugar transporter at the INT1 locus.

### Construction of the Fragments Used in Construction of the Strains

[0853] The linear DNA framents listed in Table 9 were generated by PCR amplification. For the fragments HP70, TH12, TH26, HP27 (FIGS. 7-10, respectively) the template DNA was plasmid DNA containing these fragments. For fragments PCR amplified from existing strains (S509-C04, S509-D11, S515-G04, and S622-F07 (see U.S. Provisional Application No. 63/024,010, filed May 13, 2020, the content of which is hereby incorporated by reference), genomic DNA was used as template DNA in the PCR amplification. The primers and template listed supra with sequence listed in Table 9 were used in a PCR reaction containing 5-50 ng of plasmid DNA as template, 0.1 mM each dATP, dGTP, dCTP, dTTP, 1× Phusion HF Buffer (Thermo Fisher Scienctific), and 2 units Phusion Hot Start DNA polymerase in a final volume of 50 μL. The PCR was performed in a T100™ Thermal Cycler (Bio-Rad Laboratories, Inc.) programmed for one cycle at 98° C. for 30 seconds followed by 32 cycles each at 98° C. for 10 seconds, 59° C. for 20 seconds, and 72° C. for 40 seconds with a final extension at 72° C. for 10 minutes. Following thermocycling, the PCR reaction products gel isolated and cleaned up using the NucleoSpin Gel and PCR clean-up kit (Machery-Nagel).

TABLE 9
DNA used during transformations to generate S982-B01, S982-B03 and S982-D06 strains

| | Template | | | | |
|---|---|---|---|---|---|
| | (strain or | 5′ | 3′ | Size | |
| DNA fragment description | plasmid) | primer | primer | (bp) | name |
| 50bp pPGK1\|G4N708tADH3\| | S509-C04 | 1230242 | 1230207 | 3262 | HH66a |
| pTDH3\|EFP6RPZ73\|tPDC6 | | | | | |
| tPDC6\|pADH1\|A3GF74\|tTEF1\|pPMA1 | S509-C04 | 1230179 | 1230199 | 4079 | HH66b |
| pPMA1\|Q70FD1\|tSTE2\| | S509-C04 | 1230171 | 1230205 | 4100 | HH67 |
| pTEF2\|C5J3R8\|tPRM9 | | | | | |
| tPRM9\|XII-2_3′ | TH12 | 1230177 | 1230216 | 750 | TH12 |
| INT1_5′\|pRPL18B | HP70 | 1230733 | 1230195 | 1200 | HP70 |
| 50bp pRPL18B\|A1C8W7\|50bp tENO2 | S622-F07 | 1233593 | 1233594 | 1645 | HH68 |
| tENO2\|INT1_3′ | TH26 | 1230176 | 1230736 | 685 | TH26 |
| 50bp pPGK1\|G4N708\|tADH3\|pTDH3\| | S509-D11 | 1230242 | 1230199 | 7079 | HH69 |
| EFP6RPZ73\| | | | | | |
| tPDC6\|pADH1\|A3GF74\|tTEF1\|pPMA1 | | | | | |
| pPMA1\|G3YG17\|tSTE2\|pTEF2\|B6HI95\|tPRM9 | S509-D11 | 1230171 | 1230205 | 4149 | HH70 |
| 50bp pPGK1\|G4N708\|tADH3\|pTDH3\| | S515-G04 | 1230242 | 1230207 | 3262 | HH71a |
| EFP6RPZ73\|tPDC6 | | | | | |
| 50bp pPGK1\|G4N708\|tADH3\| | S515-G04 | 1230179 | 1230199 | 4079 | HH71b |
| pTDH3\|EFP6RPZ73\|tPDC6\|pADH11 | | | | | |
| A3GF74\|tTEF1\|pPMA1 | | | | | |
| pPMA1\|EFP2BNSMN\|tSTE2\| | S515-G04 | 1230171 | 1230205 | 4140 | HH72 |
| pTEF2\|Q763T4\|tPRM9 | | | | | |
| XII-2 5′ + pPGK1 | HP27 | 1230183 | 1230191 | 1200 | HP27 |

Integration of the DNA Fragments Containing the C5 Sugar Utilization Pathway and C5 Sugar Transporter into Strain S859-C01

[0854] The yeast S859-C01 was transformed with the DNA pieces indicted in Table 10. To aid homologous recombination of the DNA fragments at the genomic XII-2 and INT1 sites a plasmid containing MAD7 and guide RNA specific to XII-2 and INT1 (pMIBa771; FIG. 11) was also used in the transformation. These components were transformed into the into S. cerevisiae strain S859-C01 following a yeast electroporation protocol. Transformants were selected on YPD+cloNAT to select for transformants that contain the Mad7 plasmid pMIBa771. Transformants were picked using a Q-pix Colony Picking System (Molecular Devices) to inoculate one well of 96-well plate containing YPD+cloNAT media. The plates were grown for 2 days then glycerol was added to 20% final concentration and the plates were stored at −80° C. until needed. Integration of specific phospholipase construct was verified by PCR with locus specific primers and subsequent sequencing. The strains generated in this example are shown in Table 10.

TABLE 10
Final strains and DNA pieces used to generate
the strains using CRISPR plasmids pMIBa771

| | Template | | Pentose Pathway Genes | |
|---|---|---|---|---|
| Strain ID | strain | Pieces | (XR, LAD, LXR, XDH, XK) | Transporter |
| S859-C01 | — | — | None | None |
| S982-B01 | S509-C04 | HP27, HH66a, HH66b, | G4N708, C5J3R8, | A1C8W7 |
| | | HH67, TH12, HP70, | Q70FD1, EFP6RPZ73, | |
| | | HH68, TH26 | A3GF74 | |
| S982-B03 | S509-D11 | HP27, HH69, HH70, | G4N708, B6HI95, | A1C8W7 |
| | | TH12, HP70, HH68, | G3YG17, EFP6RPZ73, | |
| | | TH26 | A3GF74 | |
| S982-D06 | S515-G04 | HP27, HH71a, HH71b, | G4N708, Q763T4, | A1C8W7 |
| | | HH72, TH12, HP70, | EFP2BNSMN, | |
| | | HH68, TH26 | EFP6RPZ73, A3GF74 | |

TABLE 11
Primers used in this example.

| Primer | SEQ | |
|---|---|---|
| name | ID NO. | Primer sequence (5′-3′) |
| 1230171 | 483 | ACTCAGCTTT GCTAAAGTG CAAAAAGTC |
| 1230176 | 484 | AGTGCTTTTA ACTAAGAAT TATTAGTCTT TTCTGC |
| 1230177 | 485 | ACAGAAGACG GGAGACACT AG |
| 1230179 | 486 | GCCATTAGTA GTGTACTCA AACGAATTAT TG |
| 1230183 | 487 | TCTTTTCGCG CCCTGGAAA |
| 1230191 | 488 | TGTTTTATAT TTGTTGTAAA AAGTAGATAA TTACTTCCTT |
| | | GATG |
| 1230195 | 489 | TTTGTTTTTT GTTTTCTTCT AATTGATTTT TTCTTTCTAT |
| | | TTCC |
| 1230199 | 490 | ATTGATATTG TTCGATAATT AAATCTTTCT TATCTTCTTA |
| | | TTCTTTTC |
| 1230205 | 491 | ATTTTCAACA TCGTATTTTC CGAAGCGTTG |
| 1230207 | 492 | TTGACGTGGC TGAACAACAG TC |
| 1230216 | 493 | TCAGTCCAAT GACAGTATTT TCTCCTTCTC AC |
| 1230242 | 494 | ACAGATCATC AAGGAAGTAA TTATCTACTT TTTACAAC |
| 1230733 | 495 | AAAGAGGAAA CTTCAACGCT TCATTTGAAA ATC |
| 1230736 | 496 | AATTGTAGAA TACAAATACA TAAATAAGTG TGTTCCCGAA G |
| 1233593 | 497 | ACCAAAGGAA ATAGAAAGAA AAAATCAATT AGAAGAAAAC |
| | | AAAAAACAAA ATGTATAGAA TTTCAAACAT CTATGTTCTA |
| | | GCAG |
| 1233594 | 498 | ATGATGAAAA AATAAGCAGA AAAGACTAAT AATTCTTAGT |
| | | TAAAAGCACT TTATACTACC TCAGCGTGTA CTGC |

### Example 5

### Evaluation of Yeast Strains Expressing a Heterologous Sugar Transporter

[0855] This example describes the evaluation of yeast strains in corn mash fermentations, including the impact of five carbon sugar utilization gene expression on final ethanol titer in a corn mash fermentation supplemented with L-arabinose and D-xylose is studied. The yeast strains used in this example are listed in Table 12.

TABLE 12

| | C5 Pathway Engineering | C5 Trans- | Redox Balance |
|---|---|---|---|
| Strain ID | (XR, LAD, LXR, XDH, XK) | porter | Engineering |
| MeJi797 | None | None | none |
| S859-C01 | None | None | GAPN (Q59931), |
| | | | ΔGPD1, ΔFPS1 |
| S982-B01 | G4N708, C5J3R8, | A1C8W7 | GAPN (Q59931), |
| | Q70FD1, EFP6RPZ73, | | ΔGPD1, ΔFPS1 |
| | A3GF74 | | |
| S982-B03 | G4N708, B6HI95, | A1C8W7 | GAPN (Q59931), |
| | G3YG17, EFP6RPZ73, | | ΔGPD1, ΔFPS1 |
| | A3GF74 | | |
| S982-D06 | G4N708, Q763T4, | A1C8W7 | GAPN (Q59931), |
| | EFP2BNSMN, | | ΔGPD1, ΔFPS1 |
| | EFP6RPZ73, A3GF74 | | |

### Corn Mash Fermentation Procedure

[0856] Yeast strains were incubated overnight in 20 mL YPD media (6% w/v D-glucose, 2% peptone, 1% yeast extract) in 50 ml baffled shake flasks at 32° C. at 150 rpm at 32° C. Cells were harvested after ˜24 hours incubation. Cells were collected by centrifugation and washed in DI water prior to resuspending in 20 mls DI water for dosing. Industrially obtained liquefied corn mash, where liquefaction was carried out using the Fortiva product from Novozymes, was supplemented with 24 ppm Lactrol and 283 ppm of urea. This mash was supplemented with both L-arabinose and D-xylose (solid) to a target concentration of 10 g/kg mash for each sugar. Simultaneous saccharification and fermentation (SSF) was performed via mini-scale fermentations. Approximately 5 g of C5 supplemented corn mash was added to 15 mL conical tubes. Each tube was dosed with 5×10⁶ cells/g of mash with one of the yeast strains shown in Table 12 followed by the addition of 0.36 AGU/g of dry solids of an exogenous glucoamylase enzyme product (Innova Achieve F). Six replicate tube fermentations were conducted for each yeast strain. Glucoamylase and yeast dosages were administered based on the exact weight of corn slurry in each vial. Tubes were incubated at 32° C. and mixed two to three times per day via brief vortex. After 70 hours fermentation time, tubes were centrifuged @3500 rpm for 5 min. Supernatant samples were filtered with 0.2 μm syringe filters into vials for analysis of final ethanol level via HPLC.

### Results

[0857] Final ethanol level results are shown in FIG. 12. Strains expressing genes for five carbon sugar utilization were able to achieve significantly higher final ethanol levels in C5 supplemented corn mash fermentations than the two control strains. The strain with the highest mean final ethanol (S982-D06) was over 2% higher than the S859-C01 parent and 4% higher than the MeJi797 reference control.

1. A recombinant host cell comprising a heterologous polynucleotide encoding a sugar transporter, wherein the transporter has a mature polypeptide sequence with at least sequence identity to any one of SEQ ID NOs: 257-397; and wherein the cell comprises an active pentose fermentation pathway.

2. The recombinant host cell of claim 1, wherein the cell comprises an active xylose fermentation pathway.

3. The recombinant host cell of claim 2, wherein the cell comprises one or more active xylose fermentation pathway genes selected from:
a heterologous polynucleotide encoding a xylose isomerase (XI), and
a heterologous polynucleotide encoding a xylulokinase (XK).

4. The recombinant host cell of claim 2, wherein the cell comprises one or more active xylose fermentation pathway genes selected from:
a heterologous polynucleotide encoding a xylose reductase (XR),
a heterologous polynucleotide encoding a xylitol dehydrogenase (XDH), and
a heterologous polynucleotide encoding a xylulokinase (XK).

5. The recombinant host cell of claim 1, wherein the cell comprises an active arabinose fermentation pathway.

6. The recombinant host cell of claim 5, wherein the cell comprises one or more active arabinose fermentation pathway genes selected from:
a heterologous polynucleotide encoding a L-arabinose isomerase (AI),
a heterologous polynucleotide encoding a L-ribulokinase (RK), and
a heterologous polynucleotide encoding a L-ribulose-5-P4-epimerase (RSPE).

7. The recombinant host cell of claim 5, wherein the cell comprises one or more active arabinose fermentation pathway genes selected from:
a heterologous polynucleotide encoding an aldose reductase (AR),
a heterologous polynucleotide encoding a L-arabinitol 4-dehydrogenase (LAD),
a heterologous polynucleotide encoding a L-xylulose reductase (LXR),
a heterologous polynucleotide encoding a xylitol dehydrogenase (XDH) and
a heterologous polynucleotide encoding a xylulokinase (XK).

8. The recombinant host cell of claim 1, wherein the cell further comprises a heterologous polynucleotide encoding a glucoamylase, alpha-amylase, phospholipase, trehalase, protease, or pullulanase.

9. The recombinant host cell of claim 1, wherein the cell is capable of higher anaerobic growth rate on pentose compared to the same cell without the heterologous polynucleotide encoding a sugar transporter.

10. The recombinant host cell of claim 1, wherein the cell is capable of higher pentose consumption compared to the same cell without the heterologous polynucleotide encoding a sugar transporter at about or after 120 hours fermentation.

11. The recombinant host cell of claim 1, wherein the cell is capable of higher ethanol production compared to the same cell without the heterologous polynucleotide encoding a sugar transporter under the same conditions.

12. The recombinant host cell of claim 1, wherein the cell further comprises a heterologous polynucleotide encoding a transketolase (TKL1) and/or a heterologous polynucleotide encoding a transaldolase (TAL1).

13. The recombinant host cell of claim 1, wherein the cell further comprises a disruption to an endogenous gene encoding a glycerol 3-phosphate dehydrogenase (GPD) and/or a disruption to an endogenous gene encoding a glycerol 3-phosphatase (GPP).

14. The recombinant host cell of claim 1, wherein the cell is a yeast cell (e.g., a Saccharomyces cerevisiae cell).

15. A composition comprising the recombinant host cell of claim 1 and one or more naturally occurring and/or non-naturally occurring components, such as components are selected from the group consisting of: surfactants, emulsifiers, gums, swelling agents, and antioxidants.

16. A method of producing a derivative of a recombinant host cell of claim 1, the method comprising:
(a) providing:
(i) a first host cell; and
(ii) a second host cell, wherein the second host cell is a recombinant host cell of claim 1;
(b) culturing the first host cell and the second host cell under conditions which permit combining of DNA between the first and second host cells;
(c) screening or selecting for a derive host cell.

17. A method of producing a fermentation product from a starch-containing or cellulosic-containing material, the method comprising:
(a) saccharifying the starch-containing or cellulosic-containing material; and
(b) fermenting the saccharified material of step (a) with the recombinant host cell of claim 1 under suitable conditions to produce the fermentation product.

18. The method of claim 17, wherein saccharification of step (a) occurs on a starch-containing material, and wherein the starch-containing material is either gelatinized or ungelatinized starch.

19. The method of claim 18, comprising liquefying the starch-containing material by contacting the material with an alpha-amylase prior to saccharification.

20. (canceled)

21. The recombinant host cell of claim 1, wherein the transporter has a mature polypeptide sequence with at least 95% sequence identity to any one of SEQ ID NOs: 257-397; and wherein the cell comprises an active pentose fermentation pathway.

The application's sequence listing, which the Patent Office published only in electronic form, follows.

SEQUENCE LISTING (498 sequences)

SEQ ID NO: 1 - DNA, 621 bp, Saccharomyces cerevisiae
cagttcgagtttatcattatcaatactgccatttcaaagaatacgtaaataattaatagtagtgattttcctaactttatttagtcaaaaaattagccttttaattctgctgtaacccgtacatgcccaaaatagggggcgggttacacagaatatataacatcgtaggtgtctgggtgaacagtttattcctggcatccactaaatataatggagcccgctttttaagctggcatccagaaaaaaaaagaatcccagcaccaaaatattgttttcttcaccaaccatcagttcataggtccattctcttagcgcaactacagagaacaggggcacaaacaggcaaaaaacgggcacaacctcaatggagtgatgcaacctgcctggagtaaatgatgacacaaggcaattgacccacgcatgtatctatctcattttcttacaccttctattaccttctgctctctctgatttggaaaaagctgaaaaaaaaggttgaaaccagttccctgaaattattcccctacttgactaataagtatataaagacggtaggtattgattgtaattctgtaaatctatttcttaaacttcttaaattctacttttatagttagtctt

SEQ ID NO: 2 - DNA, 644 bp, Saccharomyces cerevisiae
agctacctatattccaccataatatcaatcatgcggttgctggtgtatttaccaataatgtttaatgtatatatattaggggccgtatacttacatatagtagatgtcaagcgtaggcgcttcccctgccggctgtgacggcgccataaccaaggtatctatagaccgccaatcagcaaactacctccgtacattcatgttgcacccacacatgtacacacccagaccgcaacaaattacccataaggttgtttgtgacggcgtcgtacaagagaacgtgggaactttttaggctcaccaaaaaagaaaggaaaaatacgagttgctgacagaagcctcaagaaaaaaaaaattcttcttcgactatgctggaggcagagatgatcgagccggtagttaactatatatagctaaattggttccatcaccttcttttctggtgtcgctccttctagtgctatttctggcttttcctattttttttttttccatttttctttctctctttctaatatataaattctcttgcattttctatttttctctctatctattctacttgtttattcccttcaaggtttttttttaaggagtacttgtttttagaatatacggtcaacgaactataattaagctagaacaaa

SEQ ID NO: 3 - DNA, 457 bp, Saccharomyces cerevisiae
ctccagaaaggcaacgcaaaattttttttccagggaataaactttctatgacccactacttctcgtaggaacaatttcgggcccctgcgtgttcttctgaggttcatcttttacatttgcttctgctggataattttcagaggcaacaaggaaaaattagatggcaaaaagtcgtctttcaaggaaaaatccccaccatccttcgagatcccctgtaacttattggcaactgaaagaatgaaaaggaggaaaatacaaaatatactagaactgaaaaaaaaaagtataaatagagacgatatatgccaatacttcacaatgttcgaatccattcttcatttgcagctattgtaaaataataaaacatcaagaacaaacaagctcaacttgtcttttctaagaacaaagaataaacacaaaaacaaaaagtttttttaattttaatcgctagaacaaa

SEQ ID NO: 4 - DNA, 700 bp, Saccharomyces cerevisiae
gtgagtaaggaaagagtgaggaactatcgcatacctgcatttaaagatgccgatttgggcgcgaatcctttattttggcttcaccctcatactattatcagggccagaaaaaggaagtgtttccctccttcttgaattgatgttaccctcataaagcacgtggcctcttatcgagaaagaaattaccgtcgctcgtgatttgtttgcaaaaagaacaaaactgaaaaaacccagacacgctcgacttcctgtcatcctattgattgcagcttccaatttcgtcacacaacaaggtcctagcgacggctcacaggttttgtaacaagcaatcgaaggttctggaatggcgggaaagggtttagtaccacatgctatgatgcccactgtgatctccagagcaaagttcgttcgatcgtactgttactctctctctttcaaacagaattgtccgaatcgtgtgacaacaacagcctgttctcacacactcttttcttctaaccaagggggtggtttagtttagtagaacctcgtgaaacttacatttacatatatataaacttgcataaattggtcaatgcaagaaatacatatttggtcttttctaattcgtagtttttcaagttcttagatgctttctttttctcttttttacagatcatcaaggaagtaattatctactttttacaacaaatataaaaca

SEQ ID NO: 5 - DNA, 705 bp, Sacharromyces cerevisiae
atccttttgttgtttccgggtgtacaatatggacttcctcttttctggcaaccaaacccatacatcgggattcctataataccttcgttggtctccctaacatgtaggtggcggaggggagatatacaatagaacagataccagacaagacataatgggctaaacaagactacaccaattacactgcctcattgatggtggtacataacgaactaatactgtagccctagacttgatagccatcatcatatcgaagtttcactaccctttttccatttgccatctattgaagtaataataggcgcatgcaacttcttttctttttttttcttttctctctcccccgttgttgtctcaccatatccgcaatgacaaaaaaatgatggaagacactaaaggaaaaaattaacgacaaagacagcaccaacagatgtcgttgttccagagctgatgaggggtatctcgaagcacacgaaactttttccttccttcattcacgcacactactctctaatgagcaacggtatacggccttccttccagttacttgaatttgaaataaaaaaaagtttgctgtcttgctatcaagtataaatagacctgcaattattaatcttttgtttcctcgtcattgttctcgttccctttcttccttgtttctttttctgcacaatatttcaagctataccaagcatacaatcaact

SEQ ID NO: 6 - DNA, 700 bp, Saccharomyces cerevisiae
aagaggatgtccaatattttttttaaggaataaggatacttcaagactagattcccccctgcattcccatcagaaccgtaaaccttggcgctttccttgggaagtattcaagaagtgccttgtccggtttctgtggctcacaaaccagcgcgcccgatatggctttcttttcacttatgaatgtaccagtacgggacaattagaacgctcctgtaacaatctctttgcaaatgtggggttacattctaaccatgtcacactgctgacgaaattcaaagtaaaaaaaaatgggaccacgtcttgagaacgatagattttctttattttacattgaacagtcgttgtctcagcgcgctttatgttttcattcatacttcatattataaaataacaaaagaagaatttcatattcacgcccaagaaatcaggctgctttccaaatgcaattgacacttcattagccatcacacaaaactctttcttgctggagcttcttttaaaaaagacctcagtacaccaaacacgttacccgacctcgttattttacgacaactatgataaaattctgaagaaaaaataaaaaaattttcatacttcttgcttttatttaaaccattgaatgatttcttttgaacaaaactacctgtttcaccaaaggaaatagaaagaaaaaatcaattagaagaaaacaaaaaacaaa

SEQ ID NO: 7 - protein, 19 aa, Saccharomyces cerevisiae
MRFPSIFTTVLFAASSALA

SEQ ID NO: 8 - protein, 556 aa, Gloeophyllum sepiarium
QSVDSYVSSEGPIAKAGVLANIGPNGSKASGASAGVVVASPSTSDPDYWYTWTRDSSLVFKSLIDQYTTGIDGTSSLRTLIDDFVTAEANLQQVSNPSGTLTTGGLGEPKFNVDETAFTGAWGRPQRDGPALRSTALITYGNWLLSNGNTSYVTSNLWPIIQNDLGYVVSYWNQSTYDLWEEVDSSSFFTTAVQHRALREGAAFATAIGQTSQVSSYTTQADNLLCFLQSYWNPSGGYITANTGGGRSGKDANTLLASIHTYDPSAGCDAATFQPCSDKALSNLKVYVDSFRSVYSINSGIASNAAVATGRYPEDSYQGGNPWYLTTFAVAEQLYDALNVWESQGSLEVTSTSLAFFQQFSSGVTAGTYSSSSSTYSTLTSAIKSFADGFVAVNAKYTPSNGGLAEQYSKSDGSPLSAVDLTWSYASALTAFEARNNTQFAGWGAAGLTVPSSCSGNSGGPTVAVTFNVNAETVWGENIYLTGSVDALENWSADNALLLSSANYPTWSITVNLPASTAIEYKYIRKNNGAVTWESDPNNSITTPASGSTTENDTWR

SEQ ID NO: 9 - protein, 374 aa, Aspergillus niger
APAPTRKGFTINQIARPANKTRTINLPGMYARSLAKFGGTVPQSVKEAASKGSAVTTPQNNDEEYLTPVTVGKSTLHLDFDTGSADLWVFSDELPSSEQTGHDLYTPSSSATKLSGYTWDISYGDGSSASGDVYRDTVTVGGVTTNKQAVEAASKISSEFVQNTANDGLLGLAFSSINTVQPKAQTTFFDTVKSQLDSPLFAVQLKHDAPGVYDFGYIDDSKYTGSITYTDADSSQGYWGFSTDGYSIGDGSSSSSGFSAIADTGTTLILLDDEIVSAYYEQVSGAQESEEAGGYVFSCSTNPPDFTVVIGDYKAVVPGKYINYAPISTGSSTCFGGIQSNSGLGLSILGDVFLKSQYVVFNSEGPKLGFAAQA

SEQ ID NO: 10 - protein, 590 aa, Trichoderma reesei
SVHLLESLEKLPHGWKAAETPSPSSQIVLQVALTQQNIDQLESRLAAVSTPTSSTYGKYLDVDEINSIFAPSDASSSAVESWLQSHGVTSYTKQGSSIWFQTNISTANAMLSTNFHTYSDLTGAKKVRTLKYSIPESLIGHVDLISPTTYFGTTKAMRKLKSSGVSPAADALAARQEPSSCKGTLVFEGETFNVFQPDCLRTEYSVDGYTPSVKSGSRIGFGSFLNESASFADQALFEKHFNIPSQNFSVVLINGGTDLPQPPSDANDGEANLDAQTILTIAHPLPITEFITAGSPPYFPDPVEPAGTPNENEPYLQYYEFLLSKSNAEIPQVITNSYGDEEQTVPRSYAVRVCNLIGLLGLRGISVLHSSGDEGVGASCVATNSTTPQFNPIFPATCPYVTSVGGTVSFNPEVAWAGSSGGFSYYFSRPWYQQEAVGTYLEKYVSAETKKYYGPYVDFSGRGFPDVAAHSVSPDYPVFQGGELTPSGGTSAASPVVAAIVALLNDARLREGKPTLGFLNPLIYLHASKGFTDITSGQSEGCNGNNTQTGSPLPGAGFIAGAHWNATKGWDPTTGFGVPNLKKLLALVRF

SEQ ID NO: 11 - protein, 511 aa, Thermoascus aurantiacus
VPVEVAGSAQGLDVTLSQVGNTRIKAVVKNTGSEDVTFVHLNFFKDAAPVQKVSLFRNATEVQFQGIKQRLITEGLSDDALTTLAPGATIEDEFDIASTSDLSEGGTITINSNGLVPITTDNKVTGYIPFTSNELSIDVDAAEAASVTQAVKILERRTRISSCSGSRQSALTTALRNAASLANKAADAAQSGSASKFSEYFKTTSSSTRQTVAARLRAVAREASSSSSGATTYYCLDPFGYCSGNVLAYTLPSYNIIANCPIFYTYLPPLTSTCHAQDQATTVLHEFTHAPGVYSPGTLDLAYGYQAAMGLSSSQAVMNADTYALYANAIYLGCTRISSCSGSRQSALTTALRNAASLANAAADAAQSGSASKFSEYFKTTSSSTRQTVAARLRAVAREASSSSSGATTYYCDDPYGYCSSNVLAYTLPSYNIIANCDIFYTYLPALTSTCHAQDQATTALHEFTHAPGVYSPGTDDLAYGYQAAMGLSSSQAVMNADTYALYANAIYLGC

SEQ ID NO: 12 - protein, 550 aa, Dichomitus squalens
KPTARNLKLHESRPSAPNGFSLVGSADSNRTLKLRLALAESNFSELERKLYDVSTPKSANYGKHLSKAEVQQLVAPGQDSIDAVNAWLKENDITAKTISSTGEWISFEVPVSKANDLFDADFSVFKHDDTGVEAIRTLSYSIPAELQGHLDLVHPTVTFPNPYSHLPVFQSPVKKTAEIQNFTAGAIPSSCSSTITPACLQAIYNIPTTAATESSNQLGVTGFIDQYANKKDLKTFLKKYRTDISSSTTFTLQTLDGGSNSQTGSKAGVEANLDIQYTVGVATGVPTTFISVGDDFQDGDLEGFLDVINALLDEDAPPSVLTTSYGQDESTISRALAVKLCNAYAQLGARGVSILFASGDGGVSGSQSASCSKFVPTFPSGCPYMTSVGATQGVNPETAADFSSGGFSNYWGVPDYQSDAVSTYLSALGKTNSGKYNASGRGFPDVSTQGVSFEVVVDGSVEAVDGTSCASPTFASIISLVNDKLVAAGKSPLGFLNPFLYSDGVAALNDITSGSNPGCNTNGFPAKKGWDPVTGLGTPDFKKLLTAVGL

SEQ ID NO: 13 - protein, 353 aa, Nocardiopsis prasina
ATGALPQSPTPEADAVSMQEALQRDLDLTSAEAEELLAAQDTAFEVDEAAAEAAGDAYGGSVFDTESLELTVLVTDAAAVEAVEATGAGTELVSYGIDGLDEIVQELNAADAVPGVVGWYPDVAGDTVVLEVLEGSGADVSGLLADAGVDASAVEVTTSDQPELYADIIGGLAYTMGGRCSVGFAATNAAGQPGFVTAGHCGRVGTQVTIGNGRGVFEQSVFPGNDAAFVRGTSNFTLTNLVSRYNTGGYATVAGHNQAPIGSSVCRSGSTTGWHCGTIQARGQSVSYPEGTVTNMTRTTVCAEPGDSGGSYISGTQAQGVTSGGSGNCRTGGTTFYQEVTPMVNSWGVRLRT

SEQ ID NO: 14 - protein, 456 aa, Penicillium simplicissimum
APASTAKDSVSSVVKNGVKYTVFEHAATGAKMEFVKNSGICETTPGVNQYSGYLSVGSNMNMWFWFFEARNNPQQAPLAAWFNGGPGCSSMIGLFQENGPCHFVNGDSTPSLNEYSWNNYANMLYVDQPIGVGFSYGTDDVTSTVTAAPYVWKLLQAFYAQFPEYESRDFAIFTESYGGHYGPEFASYIQEQNSAIKTGSISGENINLVALGVNNGWIDSTIQEKAYIDFSYNNSYQQLIDDSQRTSLLSAYNSQCLPAIQKCTKSGSNSDCQNADSVCYNKIEGPISSSGDWDVYDIREPSNDPYPPSTYSTYLSNADVVKAIGAQSSYQECPNGPYNKFASTGDNPRSFLSTLSSVVKSGINVLVWAGDADWICNWLGNYEVANAVDFSGHTEFSAKDLAPYTVNGTEKGMFKNVANFSFLKVYGAGHEVPYYQPDTALQVFEQVLQNKPIFST

SEQ ID NO: 15 - protein, 502 aa, Aspergillus niger
LQNPHRRAVPPPLSHRSVASRSVPVERRTTDFEYLTNKTARFLVNGTSIPEVDFDVGESYAGLLPNTPTGNSSLFFWFFPSQNPEASDEITIWLNGGPGCSSLDGLLQENGPFLWQPGTYKPVPNPYSWTNLTNVVYIDQPAGTGFSPGPSTVNNEEDVAAQFNSWFKHFVDTFDLHGRKVYITGESYAGMYVPYIADAMLNEEDTTYFNLKGIQINDPSINSDSVMMYSPAVRHLNHYNNIFQLNSTFLSYINAKADKCGYNAFLDKAITYPPPSPFPTAPEITEDCQVWDEVVMAAYDINPCFNYYHLIDFCPYLWDVLGFPSLASGPNNYFNRSDVQKILHVPPTDYSVCSETVIFANGDGSDPSSWGPLPSVIERTNNTIIGHGWLDYLLFLNGSLATIQNMTWNGKQGFQRPPVEPLFVPYHYGLAELYWGDEPDPYNLDAGAGYLGTAHTERGLTFSSVYLSGHEIPQYVPGAAYRQLEFLLGRISSLSAKGNYTS

SEQ ID NO: 16 - protein, 547 aa, Meriphilus giganteus
TPTGRNLKLHEAREDLPAGFSLRGAASPDTTLKLRIALVQNNFAELEDKLYDVSTPSSANYGNHLSKEEVEQYIAPAPESVKAVNAWLTENGLDAHTISPAGDWLAFEVPVSKANELFDADFSVFTHDESGLEAIRTLAYSIPAELQGHLDLVHPTVTFPNPNAHLPVVRSTQPIRNLTGRAIPASCASTITPACLQAIYGIPTTKATQSSNKLAVSGFIDQFANKADLKSFLAQFRKDISSSTTFSLQTLDGGENDQSPSEAGIEANLDIQYTVGLATGVPTTFISVGDDFQDGNLEGFLDIINFLLGESNPPQVLTTSYGQNENTISAKLANQLCNAYAQLGARGTSILFASGDGGVSGSQSAHCSNFVPTFPSGCPFMTSVGATQGVSPETAAAFSSGGFSNVFGIPSYQASAVSGYLSALGSTNSGKFNRSGRGFPDVSTQGVDFQIVSGGQTIGVDGTSCASPTFASVISLVNDRLIAAGKSPLGFLNPFLYSSAGKAALNDVTSGSNPGCSTNGFPAKAGWDPVTGLGTPNFAKLLTAVGL

SEQ ID NO: 17 - protein, 541 aa, Lecanicillium sp.
APAPHGPLVKFGEITKLPSKWIATGAADSDAVIKAQIGIKQNNIKGLQDKLADIADPNSPNYGQWLSKEEVDKYSAPAAADVAAVKAWLASSGITDVTMPTNDWIEFSVPVSKMESLLGSKYEWFVHLETGEKVPRTKQFSVPQNLHDLIDVVTPTTVLYHNMGPHAHASPQAADASGLTSPASIKSAYNVDYKGTGNTLVGTTGFLGVGASHQDYANFARQFSPGLTDFKDVSINGGSNSGDGSALEGNLDTQYCGALAAPNPSEYLAHAPEGSDGSSFNDAMLAFGNYLNANSNPPSAVSTSYGGEEDGTDPNYMDRICNEFMKAGSRGVSIFFSSGDNGVGGNGESSCYNGYYPLWPASCPYVTTVGGTEFDGSGREVVANFEQYNKNVKSPGGGFSNHFPAPSYNKNVTTAYANSLSAAQKQRLNPNGRGFPDIALVSVKYQVNVNGQISQVLGTSASSPSMAGLVGLLNDYRKTQGKPNLGFINPLLYSDKVKPALRDVTSGANKGCDSSGLPAKTGWDAASGLGSFDFAKLRTLV

SEQ ID NO: 18 - protein, 633 aa, Talaromyces proteolyticus
VPAPSKRHVVHERRDALPHSWSEPRRVDGRTQLPVRIGLTQSNIDESHDMLMDIASPSSPNYRKYMTVHEVNELFAPAGEAVSAVRDWLESAGIAAERVTQSANKQWLQFDGDAAEVESLLGAEYYIYTHDTNGRSHMGCEKYHVPEHISHHIDYIIPGVKSLEVREPQPAELEKRTFGFRKPQPPLFKALPESLETIINSILGGLLDLCSTVITPSCIKTLYNITEGTTATKGNELGIFEDLGDYYSQTDLDLFFTLFYSQIPAGTGPTLKGIDGAQAPTQTLTQAGPESDLDFQVSYPIIWPQNSILFQTDDANYEANYTFNGFLNNFLDAIDGSYCTYSAFGIDGNTADDPPYPDPASNGYKGSLQCGVYEPTNVISISYGGDEAGLSVNYQKRQCNEYKKLGLQGVSVVVSSGDSGVAGADGCLGGGKIFNPDFPAGCPYITTVGATYLPSGASSTSDSEVAVSRFPSGGGFSNIYSQPSYQSDAVNTYLTQHTPPYPAYETSDNSSVGANGGIYNKAGRGYPDVAAVGDNIVIFNAGAPTLIGGTSASAPIFASILTRINEVLLAKKGTTVGFVNPTLYANPDAFHDITSGDNPGCSTNGFSTAPGWDPVTGLGTPNYPALLKVFLGE

SEQ ID NO: 19 - protein, 371 aa, Penicillium ranomafanaense
VPTGGKKSFTVNQVAVSATKTQNFANNYARALAKYGAKVPTHVQAAAQQSGSATTTPESDDEEYLTPVNVGGTTLNLDFDTGSADLWVFSSELPASEQTGHSLYKPNNGTKLSGYTWSISYGDGSSASGDVYRDTVSVGGVKATGQAVEAASTISQQFTQDQNNDGLLGLAFSSINTVKPKSQTTFFDTVKSTLASPLFAVSLKHNAPGSYDFGFIDKSKYTGSLTYTDVDSSQGFWGFTADSYKIGSTTGSSIKGIADTGTTLLLLDDEVVSAYYKQVSGAASDSSAGGYTFDCSSTLPDFTVSISGYDAVVPGSLINYTPVSQGSSKCLGGIQSNSGLGFSIFGDIFLKSQYVVFDSNGPRLGFAAQSS

SEQ ID NO: 20 - protein, 578 aa, Aspergillus oryzae
EAFEKLSAVPKGWHYSSTPKGNTEVCLKIALAQKDAAGFEKTVLEMSDPDHPSYGQHFTTHDEMKRMLLPRDDTVDAVRQWLENGGVTDFTQDADWINFCTTVDTANKLLNAQFKWYVSDVKHIRRLRTLQYDVPESVTPHINTIQPTTRFGKISPKKAVTHSKPSQLDVTALAAAVVAKNISHCDSIITPTCLKELYNIGDYQADANSGSKIAFASYLEEYARYADLENFENYLAPWAKGQNFSVTTFNGGLNDQNSSSDSGEANLDLQYILGVSAPLPVTEFSTGGRGPLVPDLTQPDPNSNSNEPYLEFFQNVLKLDQKDLPQVISTSYGENEQEIPEKYARTVCNLIAQLGSRGVSVLFSSGDSGVGEGCMTNDGTNRTHFPPQFPAACPWVTSVGATFKTTPERGTYFSSGGFSDYWPRPEWQDEAVSSYLETIGDTFKGLYNSSGRAFPDVAAQGMNFAVYDKGTLGEFDGTSASAPAFSAVIALLNDARLRAGKPTLGFLNPWLYKTGRQGLQDITLGASIGCTGRARFGGAPDGGPVVPYASWNATQGWDPVTGLGTPDFAELKKLALGN

SEQ ID NO: 21 - protein, 456 aa, Talaromyces liani
APASTTKDNVSSVVKNGVTYTVFEHAATGAKMEFVKNSGICETTPGVNQYSGYLSVGNNMNMWFWFFEARNNPQTAPLAAWFNGGPGCSSMIGLFQENGPCHFVNGASTPSLNEYSWNNYANMLYVDQPIGVGFSYGTDDVTSTVTAAPYVWKLLQAFYAQFPEYQSRDFAIFTESYGGHYGPEFAAYIQEQNSGIAAGSVSGENINLIALGVNNGWIDPAIQEKAYIDFSYNNSYQQLIDDSQRTNLLSDYNDQCLPAIQQCAQTGRNSDCQNADNVCYDTIEGPISSSGNWDVYDIREPSNDPYPPSTYSSYLSNSRVVKAIGAQTSYQECPNGPYNKFASTGDNPRSFLSTLSSVVQSGIHVLVWAGDADWICNWLGNYRVANAVDFPGHAEFSAKALAPYTVNGTEKGMFKNVDNFSFLKVYGAGHEVPYYQPATALQVFEQILQNKSITST

SEQ ID NO: 22 - protein, 589 aa, Thermoascus thermophilus
EVFERLRAVPEGWRFSATPSDDQPIRLQIALQQHDVEGFERAVLDMSTPSSPNYGKHFQSHDEMKRMLLPSDDAVDAVLDWLQSAGITDIEEDADWINFRTTVGVANELLDTQFQWFVSETSSHVRRLRALEYSIPESVTPHIHMVQPTTRFGQIGRHHTTSREKPIVSGADIHASIAGANNQTTGTDCNTEITPKCLQDLYKFGGYKASANSGSKVGFCSYLEEYARYDDLALFEEALAPYAAGQNFSVITYNGGLNDQHSSSDSGEANLDLQYIVGVSAPLPVTEFSTGGRGELVPDLDQPNPADNSNEPYLDFLQNVLKLDQKDLPQVISTSYGENEQSVPEKYARSVCNLFMQLGSRGVSVIFSSGDSGVGSACLTNDGKNQTRFMPQFPASCPWVTSVGSTQHIAPEEATYFSSGGFSDLWPMPDYQKSAVGEYLDRLGSKWAGLYNPQGRGFPDVAAQGVNFNVYDKGSLKRFDGTSCSAPTFAGVIALLNDARLRARQPPMGFLNPWLYGAGKGGLNDIVNGGSTGCDGNARFGGAPNGSPVVPFASWNATQGWDPVSGLGTPDFSRLLKLAVPSRVGGRLA

SEQ ID NO: 23 - protein, 413 aa, Pyrococcus furiosus
AELEGLDESAAQVMATYVWNLGYDGSGITIGIIDTGIDASHPDLQGKVIGWVDFVNGRSYPYDDHGHGTHVASIAAGTGAASNGKYKGMAPGAKLAGIKVLGADGSGSISTIIKGVEWAVDNKDKYGIKVINLSLGSSQSSDGTDALSQAVNAAWDAGLVVVVAAGNSGPNKYTIGSPAAASKVITVGAVDKYDVITSFSSRGPTADGRLKPEVVAPGNWIIAARASGTSMGQPINDYYTAAPGTSMATPHVAGIAALLLQAHPSWTPDKVKTALIETADIVKPDEIADIAYGAGRVNAYKAINYDNYAKLVFTGYVANKGSQTHQFVISGASFVTATLYWDNANSDLDLYLYDPNGNQVDYSYTAYYDFEKVGYYNPTDGTWTIKVVSYSGSANYQVDVVSDGSLSQPGSSP

SEQ ID NO: 24 - protein, 387 aa, Trichoderma reesei
LPTEGQKTASVEVQYNKNYVPHGPTALFKAKRKYGAPISDNLKSLVAARQAKQALAKRQTGSAPNHPSDSADSEYITSVSIGTPAQVLPLDFDTGSSDLWVFSSETPKSSATGHAIYTPSKSSTSKKVSGASWSISYGDGSSSSGDVYTDKVTIGGFSVNTQGVESATRVSTEFVQDTVISGLVGLAFDSGNQVRPHPQKTWFSNAASSLAEPLFTADLRHGQNGSYNFGYIDTSVAKGPVAYTPVDNSQGFWEFTASGYSVGGGKLNRNSIDGIADTGTTLLLLDDNVVDAYYANVQSAQYDNQQEGVVFDCDEDLPSFSFGVGSSTITIPGDLLNLTPLEEGSSTCFGGLQSSSGIGINIFGDVALKAALVVFDLGNERLGWAQK

SEQ ID NO: 25 - protein, 408 aa, Rhizomucor miehei
RPVSKQSESKDKLLALPLTSVSRKFSQTKFGQQQLAEKLAGLKPFSEAAADGSVDTPGYYDFDLEEYAIPVSIGTPGQDFLLLFDTGSSDTWVPHKGCTKSEGCVGSRFFDPSASSTFKATNYNLNITYGTGGANGLYFEDSIAIGDITVTKQILAYVDNVRGPTAEQSPNADIFLDGLFGAAYPDNTAMEAEYGSTYNTVHVNLYKQGLISSPLFSVYMNTNSGTGEVVFGGVNNTLLGGDIAYTDVMSRYGGYYFWDAPVTGITVDGSAAVRFSRPQAFTIDTGTNFFIMPSSAASKIVKAALPDATETQQGWVVPCASYQNSKSTISIVMQKSGSSSDTIEISVPVSKMLLPVDQSNETCMFIILPDGGNQYIVGNLFLRFFVNVYDFGNNRIGFAPLASAYENE

SEQ ID NO: 26 - protein, 548 aa, Lenzites betulinus
KPMGRNLKVHEAREEIPDGFSLQGSAAPDTTLKLRIALVQSNFAELEQKLYDVSTPSSPNYGAHLSKEEVEQLVAPSADSVDAVNAWLKENDLSAQTISPAGDWLAFEVPVSKANELFDADFSVFTHDQTGLEAIRTMSYSIPAELQGHLDLVHPTVTFPNPYSHLPVVRSPIKASQNLTSRATIPASCASTITPACLQDIYGIPTTKATQSSNKLAVSGFIDQFANSADLATFLKKFRTDISSTTTFALQTLDGGSNSQSGSQAGVEANLDIQYTVGLASGVPVTFISVGDNFQDGDLEGFLDIINFLLAESAPPQVLTTSYGQNENTISVKLANQLCNAYAQLGARGTSILFASGDGGVSGSQSSSCSKFVPTFPSGCPFMTSVGATQGVNPETAADFSSGGFSNYFGIPSYQATAVKTYLTALGTTNSGKFNTSGRAFPDVSTQGVDFEIVVDGRTEGVDGTSCASPTFAAIISLVNDKLIAAGKSPLGFLNPFLYSTGASAFTDITSGSNPGCNTKGFPAKAGWDPVTGLGTPNFAKLLAAAGV

SEQ ID NO: 27 - protein, 547 aa, Neolentinus lepideus
GPAPRNLVLHESRDGVPEGFVKSSTASPDTTLKLRIALVQGDMASLEKALYDVSVPSSPLYGQHLSKQEVEEYVKPTQESVDAVNQWLSSEGITANTISPAGDWLQFSVPVSKANEMFDADFSVFTHTESGQQAIRTLSYSIPKELVGHLDLVHPTITFPNPYSHLPVVSSPAPRNLTIDASVPSSCGSTITPTCLQDLYGIPTTAATQSSNKLAVSGFIDQYANKADLKSFLTTYRKDISSSTTFTLETIDGGENPQDGSDAGVEANLDTQYTVGLATGVPTYFISVGDDYQDGDLEGFLDIVNYLLSMDQPQQVLTTSYGQNENTMSRSLANNLCNAYMQLGARGTSILFASGDGGVSGSQSGSCGSKFVPTFPSGCPYLTSVGATTGINPEVAASFSSGGFSNYWGVPSYQQSVVSSYISGLGSTNKGKYNSSGRGFPDVSAQGENVEIVVDGSTEGVDGTSCSSPIFASIVSLLNDELIAAGKSPLGFLNPFLYSDGASAFNDITSGDNPGCNTNGFSAKSGWDPVTGLGTPNYAKLRTAVGF

SEQ ID NO: 28 - protein, 399 aa, Thermococcus sp.
VSAEKVRVIITIDKDFNENSVFALGGNVVARGKVFPIVIAELSPRAVERLKNAKGVVRVEYDAEVQVLKGKSPGAGKPKPSQPAQTIPWGIERIKAPDVWSITDGSSSGVIEVAILDTGIDYDHPDLAANLAWGVSVLRGKVSTKPKDYKDQNGHGTHVAGTVAALNNDIGVVGVAPAVEIYAVRVLDASGRGSYSDIILGIEQALLGPDGVLDSDGDGIIVGDPDDDAAEVISMSLGGLSDVQAFHDAIIEAYNYGVVIVAASGNEGASSPSYPAAYPEVIAVGATDVNDQVPWWSNRGVEVSAPGVDVLSTYPDDSYETLSGTSMATPHVSGVVALIQAAYYNKYGSVLPVGTFDDNTMSTVRGILHITADDLGSSGWDADYGYGIVRADLAVQAVN

SEQ ID NO: 29 - protein, 396 aa, Thermococcus sp.
EKVRVIITIDKDFNENSVFALGGNVVARGKVFPIVIAELSPRAVERLKNAKGVVRVEYDAEVQVLKGKSPGAGKPKPSQPAQTIPWGIERIKAPDVWSITDGSSSGVIEVAILDTGIDYDHPDLAANLAWGVSVLRGKVSTKPKDYKDQNGHGTHVAGTVAALNNDIGVVGVAPAVEIYAVRVLDASGRGSYSDIILGIEQALLGPDGVLDSDGDGIIVGDPDDDAAEVISMSLGGLSDVQAFHDAIIEAYNYGVVIVAASGNEGASSPSYPAAYPEVIAVGATDVNDQVPWWSNRGVEVSAPGVDVLSTYPDDSYETLSGTSMATPHVSGVVALIQAAYYNKYGSVLPVGTFDDNTMSTVRGILHITADDLGSSGWDADYGYGIVRADLAVQAVN

SEQ ID NO: 30 - protein, 572 aa, Thermomyces lanuginosus
APFQVVERLSAPPDGWIKKEKAAPSAQIQFRLGLPQQNSEQLEQLALNIATPGHELYRKHLKRDEIKALVRPLASVSEKVLAWLRDEGVPEDRIHDDGAWIKFTVPVSTAEKLLNTEFFVFHNERTGAEQIRTLEYSVPQDIHSLVKFIQPTTHFSSLGPQVRRVVPLDVLPKLRITLEDCNKKITPDCLKQLYKIGDYVAPEDPRNRIGISGYLEQFARYADFEEFLESYAPDRTDANFTVVSINGGRNDQNSTLDSTEASLDIDYAVTLSYKTQAVYYTTAGRGPLVPDESQPDPNEVSNEPYMEQLQFLLDLPDEELPTVLTTSYGENEQSLPGSYADETCNMFRLLGMRGVSVIFSSGDWGTGIVCKANDGSERIKFDPVYPASCPYVTSVGGTTGVNPERAVEFSSGGFSDRFPRPKYQDEAVRSYLTKLGDHWKGLYNESGRAFPDVAAQADNFVVRDQGQWVSVGGTSASAPVFAAIIANVNAELLKAGKPPLGFLNPWLYGLKGRGFTDVVHGGSTGCPGTVPWTGLPAGHVPYASWNATEGWDPVTGLGTPLYDELVKAALGK

SEQ ID NO: 31 - protein, 397 aa, Thermococcus thioreducens
EKPELVRVIVHVDRGHFNTADVATIGGHVVYQFKLIDAVVVEVPSTAVGRLKKLPGVKMVEFDHKARILAGPPSWLGGGQPSQQIPWGISRVRAPDVWGITDGSGGVIEVAVLDTGVDYDHPDLAGNIAWCVSTLRGRVTTNPAQCKDQNGHGTHVIGTIAALNNDIGVVGVAPGVEIYSIRVLDASGSGSYSDIAIGIEQALLGPDGILDKDGDGIIVGDPDDDAAEVISMSLGGPTDDQYLHDMIITAYNYGVVIVAASGNEGASSPSYPAAYPEVIAVGASDVNDQIASWSNRQPEVSAPGVDILSTYPDDTYETLSGTSMATPHVSGVVALIQAAYYNKYGKVLPVGTFDDMGTNTVRGILHVTADDLGDAGWDIYYGYGIVRADLAVQAAIG

SEQ ID NO: 32 - protein, 549 aa, Polyporus arcularius
KPMARSMKLHESREGIPEGFSLRGAAQPEQTIKLRLALVQSNFAELERKLMDVSTPSSANYGKHLSKAEVQQLVAPTQDSVDAVKSWLKENDISAKTISATGDWLSFEVPVSKANELFDADFSIYTHDETGTEAVRTLSYSIPAELQGHLDLVHPTVTFPNPRGLPPVFTAPIKAEAQNLTSRATIPSSCARTITPACLQAIYNIPSTPATESSNKLAVTGFIEQFANKADLKTFLTRFRTDISSSTSFTLQTLDGGSNPQSSSEAGVEANLDIQYTVGVATGVPTVFISVGEDFQDGDLEGFLDVVNSLLDEDTPPFVMTTSYGQNENTISRNLANNLCNAYAQLGARGVSILFASGDGGVAGSQSASCSKFVPTFPSGCPFMTSVGATQGFSPETAADFSSGGFSNYFAIPDYQTSAVSGYIKALGNTNSGKYNATGRGFPDIATQGVNFEVVVGGQSGTVEGTSCSSPTLASIISLLNDRLIAAGKSPLGFLNPFLYSTGTSALNDITSGSNPGCNTNGFPAKAGWDPVTGLGTPDFNKLLSAVGL

SEQ ID NO: 33 - protein, 548 aa, Ganoderma lucidum
KSTTRNLKLHETRQGAPSGFSHTGSADPNQTLKLRLALVQGNTAELERKLYDVSTPSSANYGKHLSKEEVRQLVAPAQGSVDAVNAWLRENGITAKSTSAAGDWLSFEVPVSKANELFDADFSVFKHDDTGVKAVRTLSYSIPAELQGHLDLVHPTVTFPNPNGHMPVFQAPVKDTDAVQNFSARAVPSSCSNTITPACLQALYNIPSDAATQSSNKLAVTGFIEQYANQVDLAVFLKQYRADISSNTTFALQTLDGGSNSQTNVPGVEANLDIQYTVGIATGVPTVFISVGDQYQDGDLEGFLDVINFLLDEDTPPYVVTTSYGQDEHTISRKLAQNLCNAYAQLGARGVSILFASGDGGVAGSRSNSCSKFVPTFPSGCPYMTSVGATQGVPETAADFSSGGFSNYFGTPDYQASAVKSYLSTLGSTNRGKFNASGRGFPDVATQGVNFEVIVDGEVEGVSGTSAASPMFAAIVALLNDKLIAAGKSPLGFLNPFLYSKGVEALNDITTGSNPGCGTIGFPAKEGWDPVTGLGTPDFQKLASAAGL

SEQ ID NO: 34 - protein, 548 aa, Ganoderma lucidum
KTATRNLKLHETSQGAPSGFSLTGSADPDQTLKLRLALVQGNVAELERRLYDVSTPSSPNYGKHLSKSEVQQLVAPAQDSIDAINAWLKENGISAKTTSATGDWLSFEVPVSKANELFDADFSVYKHHDTGMEVVRTLSYSIPAELQAHLDLVHPTVTFPNPKGHPPVFQAPAMITNDVQNFSAGAVPSSCSSRITPACLQALYNIPSDPATQPSNKLAVTGYIEQYANQDDLAVFLKEYRADMSSNTTFTLQTLDGGVNSQTDEAGIEANLDVQYTVGIATGVPTVFISVGDQYQDGNLEGFLDVVNFLLDEDTPPYVMTTSYGQDEHTMSRKLAQNLCNAYAQLGARGVSILFASGDGGVAGSRSSSCSKFVPTFPSGCPYMTSVGATQGVPETAADFSSGGFSNYFGIPDYQASAVSGYLSALGHTNKGKYNASGRGFPDVSTQGVNFEVMVDGALEGVSGTSAASPTFAAVVALLNDRLIAAGKSPLGFLNPFLYSKGVSALNDITSGSNPGCRTNGFPAKEGWDPVTGLGTPDFQKLASAAGL

SEQ ID NO: 35 - protein, 541 aa, Ganoderma lucidum
KPTARNLRLHETRQGAPSGFSLTGSADPNQTVRLRLALVQGNTGELERKLYDVSTPSSANYGKHLSKAEVQQLVAPAQGSIDAVNAWLKENDITAKTISATGDWLSFEVPVNKANELFDADFSVFKHDDTGMEAVRTLSYSIPAELQGHLDLVHPTVTFPNPKGNLPLFQTPIKSKRDVPADCSNNITPACLQALYNIPSDAATQSSNTLAVTGYIEQYANQQDLTSFLGQFRPDISSNTTFALQTIDGGSNSQNGSDAGGEANLDIQYTVGLATGVPTVFISVGEQYQDGDLGGLLDVINFVLAEDAPPNVITTSYGQNENTISLKLAQNLCNAYAQLGARGVSILFASGDGGVAGSQSDNCTQFVPTFPSGCPYMTSVGATQGVPETAADFSTGGFSNLFSVPDYQAAAVQSYLSALGGTYQGLFNASGRAFPDVSTQGVNFETVVDGSVSGASGTSAASPTFAAIVALLNDRLVAAGKSPLGFLNPFLYSTGASALNDIATGSNPGCGTNGFSAQKGWDPVTGLGTPDFQKLAAAAGL

SEQ ID NO: 36 - protein, 547 aa, Trametes sp.
TPTGRNLKLHEAREDIPTGYSLRGAASPDTTLKLRLALVQNNFAELEDKLYDVSTPSSANYGNHLSKEEVEQYIAPAPESVKAVNAWLTENGLDAHTISPAGDWLAFEVPVSKANELFDADFSVFTHDESGLEAIRTLAYSIPAELQGHLDLVHPTVTFPNPNAHLPVVRSTKPIQNLTGRAIPASCASTITPACLQAIYGIPTTKATQSSNKLAVSGFIDQFANSADLKSFLSTFRKDISSSTTFALQTLDGGQNNQSPSQAGIEANLDIQYTVGLATGVPVTFISVGDNFQDGDLEGFLDIINFLLSESNPPQVLTTSYGQNENTISAKLANQLCNAYAQLGARGTSILFASGDGGVAGSQSSSCRNFVPTFPSGCPFMTSVGATQGVSPETAADFSSGGFSNVFGIPSYQTSAVSGYLSALGNTNSGKFNRSGRGFPDVATQGVNFQIVSGGDTGGVDGTSCASPTFASVISLINDRLIAAGKSPLGFLNPFLYSAAGKAALNDVTSGSNPGCNTNGFPAKAGWDPVTGLGTPNFAKLLTAVGL

SEQ ID NO: 37 - protein, 553 aa, Cinereomyces lindbladii
KPTARNLLVHESLDGVPTGFQLVGPASPDTVLSMRIALVQSDPAGLEAALYDVSTPSSASYGNHLSKAEVEKFVSPTSESVQAVNAWLTENDLTATQLSPAGDWLGFEVPVSKAEDLFGTQFSVFTHEATGMQTVRTLSYSIPSELQGHLDLVFPTINFPDPNANLPVFRHASKKREVTTLNANLTSDAVPSSCADTITPACLQALYGIPTTPATSSTNQLGVSGFIDQFANQADLKTFLQNFRTDISSSTTFSLETLDGGSNSQNRGDAGVEANLDTQYTVGLATDVPTVFISVGEDNQDGSLGGFLDIINFLLDQDSPPQVLTTSYGQNENTVSRAVANNLCNAYAQLGARGTSILFASGDGGVSGSQSASCRTFVPTFPSGCPFMTSVGATTGINPETAATFSAGGFSNYFGTPSYQASAVSSYLAALGSTNSGKFNTSGRGYPDVSTQGENFEIVVSGEEEGVDGTSCASPTFASIISLVNDRLIAAGKPPLGFLNPFLYSTGASAFTDITTGDNPGCNTNGFPAKSGWDPVTGLGTPNFSKLLTAVGL

SEQ ID NO: 38 - protein, 559 aa, Trametes versicolor
AVASTLQLHEARKGIPAGFSLHGAASPDTVLNLRMALVQSNFAGLEERLYDVSTPSSANYGKHLSKAEVEQYVAPRQQSITAVKAWLAANGLSGTSISPAGDWIAAKVPVSKANKLLGAQFSVFNNDATGRQIIRTLAYSIPAELKGHLDLVHPTITFADIKPLVPVVSARRESRVLVDSDLVANTIPASCNAAITPACLQDLYGIPSTPATQSSNQLGVSGFIDQFANQADLATFLTEFRPDVSNSTTFTLQTLDGGQNPQDPSDAGVEANLDTQYTVGVATNVPTTFFSVGDDTKDGIFGFLDLISFLLAAAAPPQVLTTSYGADEGGLSANLVRNLCQAYAQLGARGTSILFSSGDGGVSGSQAEGCVDFVPTFPSGCPFLTSVGATQLTTASGLTVETAAGFSSGGFSNYFPTPPYQQAVVDAYIKKTLVNGTVNEGLFNASGRAFPDVSAVGVDYLIVVGGGTDIVSGTSASSPLFASVIALINDRRLAAGKPPLGFLNPFLYSQAGASALNDVTVGSNPGCASPGFPAAQGWDPVTGLGTPNFAKLLAAALAL

SEQ ID NO: 39 - protein, 541 aa, Paecilomyces hepialid
APAPHGPLVKFGEIRKLPSKWVATGAADANAVIKGQIGIKQNNIQGLQAKLADIADPNSPNYGQWLSKEEVDKYSAPAAADVAAVKAWLASSGITDVTMPTNDWIEFSVPVSKMESLLGSKYEWFVHLETGEKVPRTKEFSVPQNLHDLIDVVTPTTVLYHNINPHTHSSPQAAGAAGLTSPASIKSAYNVDYKGTGNTLVGTTGFLGVGASHTDYANFGQQFSPGLKDFQDVSVNGGSNSGDGSALEGNLDTQYCGALAAPNPSEYLAHAPEGSDNNSFNDAMLAFGNYLNSARNPPSAVSTSYGGEEDGVDASYLDRICNEFMKAGSRGVSIFFSSGDNGVGGNGESSCQNGYYPLWPATCPYVTTVGGTEFDNSGREVVANFEQYNKNIKSPGGGYSNHFAAPSYNKAVTTSYANGLAAPQKQRLNPNGRGYPDISLVSVKYQVNVNNQISQVLGTSASSPSIAGLVGLLNDYRKTQGKPNLGFINPLLYSDKVKPALRDVTSGSNKGCDSVGLPAKTGWDAASGLGSFDFGKLRTLV

SEQ ID NO: 40 - protein, 541 aa, Isaria tenuipes
APAPHGPLVKFGELKKLPSQWVATGAANGDAVIKAQIGIKQNNIKGLQDKLAEISDPNSPSYGQWLSKEEVAKYTAPADADVAAVKAWLSSAGITEVTMPTNDWLEFSVPVSKMESLLGSKYEWFVHLETGEKAPRTKEFSVPQNLHGIIDVVTPTTVLYHNINPNSHGNELSASASGLTSPASIKSAYNVDYKGTGNTLVATTGFLGVGASHNDYLAFGHQFSPGLKDFQDVSVNGGSNSGDGSALEGNLDTQYCGALASPNPSQYLANSPEGSDNNSFNDAMTAFGNYLNSASNPPSAVSTSYGGEEDGVDAGYLDRICNEFMKAGSRGISVFFSSGDNGVGGNGEPSCQNGYYPLWPATCPYVTTVGGTEFDDSGREVVANFEQYNKNVKSPGGGYSNHFPAPDYNKNVTTAYANSLSAAQQQRLNPNGRGFPDISLVSVKYQVSLNGQTKQVLGTSASSPSVAGLVGLLNDYRKTQGKSNLGFLNPLLYSGKVNAALRDVTSGSNKGCDSVGLPAKSGWDAASGLGSFDFAKLRSLI

SEQ ID NO: 41 - protein, 578 aa, Aspergillus tamarii
EAFEKLSAVPKGWHYSSTPEGSTSVCLKIALAQKDAAGFEKRVYEMSDPDHPNYGQHFTTHEEMKRMLLPRDDTVDAVRQWLENGGVTDVRQDSDWINFCTTVDTANKLLNAQFKWYVSDVKHIRRLRTLQYDVPGSVASHVNTIQPTTRFGKITPKKAVTHSKPSQLDVTALAAAVVAKNISHCDSIITPTCLKELYNIGDYQADANSGSKIAFASYLEEYARYADLENFENYLAPWAKGQNFSVITYNGGLNDQNSSSDSGEANLDLQYILGVSAPLPVTEFSTGGRGPLVPDLTQPDPNANSNEPYLEFFQNVLKLDQEQLPQVISTSYGENEQEIPEKYARTVCNLIAQLGSRGVSVLFSSGDSGVGEGCMTNDGTNRTHFPPQFPAACPWVTSVGATYKTTPERATYFSSGGFSDYWARPEWQEEAVSSYLETIGDAFKGLYNASGRAFPDVAAQGMNFAVYDKGTLGEFDGTSASAPAFSAIIALLNDARLRAGKPTLGFLNPWLYKTGRQGLQDITLGASTGCTGRARFGGAPDGGPVVPFASWNATQGWDPVTGLGTPDFAELKKLALAN

SEQ ID NO: 42 - protein, 587 aa, Aspergillus brasiliensis
EIFEKLSGVPNGWRYANNPQGNEVIRLQIALQQHDVTGFEQAVMDMSTPGHADYGKHFRTHEEMKRMLLPSDTAVDSVRDWLESAGVHNIQVDADWIKFHTTVTKANALLDADFKWYVSEARHIRRLRTLQYSIPDALVSHINMIQPTTRFGQIQPNRATMRSKPKHADETFLTAATLAQNTSHCDSIITPSCLKQLYNIGDYQADPKSGSKIGFASYLEEYARYADLEKFEQHLAPNAIGQNFTVVQFNGGLNDQLSTKDSGEANLDLQYILGVSAPLPVTEYSTGGRGELVPDLSSPDPNDNSNEPYLDFLQNILKLNNSDLPQVISTSYGEDEQTIPVPYARAVCNLYAQLGSRGVSVIFSSGDSGVGAACLTNDGTNRTHFPPQFPASCPWVTSVGATSKTSPEQAVSFSSGGFSDLWPRPSYQHAAVQTYLTEHLGNKFSGLFNASGRAFPDVSAQGVNYAVYDKGILGQFDGTSCSAPTFSGVIALLNDARLRAGLPVMGFLNPFLYGAGSKLGGLNDIVTGGSVGCDGRNRFGGTPNGSPVVPFASWNATTGWDPVSGLGTPDFAKLKVVALGESEGDEN

SEQ ID NO: 43 - protein, 582 aa, Aspergillus iizukae
EVFDTLAAVPKGWHYSHTPRADQPISLKIALKQHNVEGFEQAVLDMSTPGHEHYGKHFREHDEMKRMLLPSDATVDAVKDWLLAADVTDYEVDADWINLHTTVQQANELLDTEFAWYVSDVRAVRRLRTLRYSVPDAVAPHINMVQPTTRFGQIHPDRATFRAGSTHFGAHILSAMSAVGDVSSANVTCDDVITPLCLKELYKVDGYRAEAEHGSKIAFASYLEEYARYDDMVRFQEKLAPYAKGENFSVILYNGGVDDQQSTSDSGEANLDLQTIMGLSAPLPITEYITGGRGKLIPDLSQPDPNDNSNEPYLEWIQNVLKHSPEELPQVISTSYGEDEQTIPRGYAESVCNLLAQLGSRGVSVIFSSGDSGVGSACQTNDGTNTTHFPPQFPASCPWVTSVGATSKTHPEEAVYFSSGGFSDLWARPAWQDDAVSTYIESIGGKFAGLYNASGRAFPDVSAQGQNYAIFDKGRLGKMDGTSCSAPAFAGIVSLLNDARLRANRPVLGFLNPWLYGTAREGLNDIVHGGSKGCDGRDRFGGKPNGSPVVPYASWNATPGWDPVSGLGTPNFATLVQVALHD

SEQ ID NO: 44 - protein, 456 aa, Penicillium sp.
APASTAKDSVSSVVKNGVKYTVFEHAATGAKMEFVKNSGICETTPGVNQYSGYLSVGSNMNMWFWFFEARNNPQQAPLAAWFNGGPGCSSMIGLFQENGPCHFVNGDSTPSLNEYSWNNYANMLYVDQPIGVGFSYGTDDVTSTVTAAPYVWKLLQAFYAQFPEYESRDFAIFTESYGGHYGPEFASYIQDQNAAIKAGSVSGENINLVALGVNNGWIDSTIQEKAYIDFSYNNSYKQLIDDSQRTSLLSAYNDQCLPAIQKCTSSGSNSDCKNADSVCYNQIEGPISSSGDWDVYDIREPSNDPYPPSTYSTYLSNADVVKAIGAQSSYQECPNGPYNKFTSTGDNPRSFLSTLSSVVKSGINVLVWAGDADWICNWLGNYEVANAVDFSGHTDFSAKDLAPYTVNGTEKGLFKNVDNFSFLRVYGAGHEVPYYQPDTALQVFEQILQKKPIFST

SEQ ID NO: 45 - protein, 456 aa, Aspergillus denticulatus
STASAAKDSVSSIVKNGVKYTVFEHAATGAKMEFVKNSGICETTPGVNQYSGYLSVGDNMNMWFWFFEARNNPQQAPLAAWFNGGPGCSSMIGLFQEHGPCHFVNGEDTPSLNEYSWNNYANMLYVDQPIGVGFSYGTDDVTSTVTAAPYVWKLLQAFYAQFPEYESRDFAVFTESYGGHYGPEFASYIQQQNAAIKAGTVSGENINLIALGVNNGWIDSAIQEKAYIDFSYNNTYKQLISSSDRTRLLSVYNSQCLPAIQKCTSTGTTAACRNADSVCYNNIEGPISSSGDWDVYDIREPANDPYPPATYSTYLADPDVVKAIGAQTSYQECPNGPYNKFASTGDNPRSFLSTLSNVVKSGINVLVWAGDADWICNWLGNYEVANAVDYPGQSEFEAKDLAPYTVNGAEKGMFKNVDNFSFLRVYGAGHEVPYYQPETALQVFQQTLQKKPIFST

SEQ ID NO: 46 - protein, 456 aa, Hamigera sp.
APASTAKDTLSSIVKNGVTYNVFEHADSGAKIEFVKNSGICETTPGVNQYSGYLSVGDNMNMWFWFFEARNNPQKAPLAAWFNGGPGCSSMIGLFQENGPCHFVNGENTPSLNEYSWNNYANMLYVDQPIGVGFSYGTDDVDSTVTAAPYVWKLLQAFYAQFPEYESRDFAIFTESYGGHYGPEFAHYIQQQNAAIKSGSVKGENINLIGLGVNNGWIDSAIQEKAYIDFSYNNSYKQLIDFSQRTSLMRAYKNQCLPAIQKCYQTGTNADCTDASSVCYNNIEGPISSSGDWDVYDIREPSNDPYPPKTYSSYLSDPKVVKAIGARTNYKECPNGPYNKFSTTGDNPRSFLSTLSDVVKSGINVILWAGDADWICNWLGGYGVANAVDYPGHAQFRAKALAPYTVNGTEKGQFKTVDNFQFLKVYGAGHEVPYYQPETALQVFEQILQKKPIHST

SEQ ID NO: 47 - protein, 456 aa, Penicillium janthinellum
APASTAKDTVSSVVKDGVTYTVFEHAATGAKMEFVKNSGICETTPGVNQYSGYLSVGSNMNMWFWFFEARNNPQQAPLAAWFNGGPGCSSMIGLFQENGPCHFVNGESTPSLNENSWNNYANMIYIDQPIGVGFSYGTDRVTSTVTAAPYVWKLLQAFYAQFPEYESRDFAIFTESYGGHYGPEFASYIEQQNAAIKAGSVTGQNVNIVALGVNNGWIDATIQEKAYIDFSYNNSYQQIIDSSTRDSLLDAYNNQCLPALQQCAQSGSNSDCTNADSVCYQNIEGPISSSGDFDVYDIREPSNDPYPPKTYSTYLSDPTVVKAIGARTNYQECPNGPYNKFASTGDNPRSFLSTLSSVVQSGINVLVWAGDADWICNWLGNYAVANAVDFPGNAQFSAMDLAPYTVNGVEKGQFKTVDNFSFLKVYGAGHEVPYYQPDTALQVFKQILQKKPISST

SEQ ID NO: 48 - protein, 456 aa, Penicillium vasconiae
APASTAKDSVSSVVKNGVKYTVFEHAATGAKMEFVKNSGICETTPGVNQYSGYLSVGSNMNMWFWFFEARNNPQQAPLAAWFNGGPGCSSMIGLFQENGPCHFVNGDSTPSLNEYSWNNYANMLYVDQPIGVGFSYGTDDVTSTVTAAPYVWKLLQAFYAQFPEYESRDFAIFTESYGGHYGPEFASYIQEQNAAITAGSVSGQKINLIALGVNNGWIDSTIQEKAYIDFSYNNSYQQLIDDSQRTSLLSAYNKQCLPAIQKCTQTGSNSACQNAANVCYNNIEGPISSSGDWDVYDIREPSNDPYPPSTYSTYLANSDVVKAIGAQSSYQECPNGPYNKFASTGDNPRSFLSTLSSVVKSGINVLVWAGDADWICNWLGNYEVANAVDFSGHAEFSAKDLAPYTVNGAEKGMFKNVDNFSFLKVYGAGHEVPYYQPETALQVFEQILQKKPISST

SEQ ID NO: 49 - protein, 454 aa, Hamigera paravellanea
APSLRDKRSFVERDGVTYTVFEHAATGAKMEFVQNSGICETTPGVNQYSGYLSVGDNMNMWFWFFEARNNPTAAPLAAWFNGGPGCSSMIGLFQENGPCHFVNGESTPSLNEYSFNNYANVLYVDQPIGTGFSYGTDDVTSTVTAAPYVWKLLQAFYAQFPEYESRDFGIFTESYGGHYGPEFASYIQEQNAAIKAGSVSGDNINLVALGINNGWFDAGIQEKAYIDFSYNNSYRQIISSSQRSSYLDAYNHDCLPAIESCASSGTNSACKNAESVCYNGIEGPISSAADFDVYDVRQPSNDPYPPATYSTYLQSASVRKAIGARTKYQECPNGPYNKFETTGDNSRSFLSTLSDVVNTGITVLVWAGDADWICNWVGGHAVADAVTFARQKTFQAKPLEPYTVNGTEKGRFKTVDNFTFLRVYEAGHEVPYYQPETALQVFVQTMQKKAIFST

SEQ ID NO: 50 - protein, 453 aa, Talaromyces variabilis
AAVPQDKRSIVKRDGVTYNVFEHAATGAKMEFVKNSGICETTPGVNQYSGYLSVGDNMNMWFWFFESRNNASGAPLAAWFNGGPGCSSMIGLFQENGPCHFVNGEKKPSLNKYSFNEYANVLYVDQPIGVGFSYGTDDVTSTESAAPYVWKLLQAFYAQFPQYESRDFGIFTESYGGHYGPEFAHYLQQQNEGVKNGSVDGENINLVALGINNGWFDTQLQEGAYIDYAYSNNYKKIIDSSQRSSLEDSLKSDCLPAVKQCLSSGSDSDCENASDTCGQIESSIQQAADFDVYDVREPSNDPYPPSTYSDYLADSSVVKAIGAKSTYKECPNGPYYKFSSTGDNTRSFLSELSSVVQSGIQVLVWAGDADWICNYMGVQRVADAVEFDGSSQFSNATLKPYTVNGTKKGEYKNVDNFSYLRVYGAGHEVPYYQPAVALQVFKQTMQQQAIKST

SEQ ID NO: 51 - protein, 456 aa, Penicillium arenicola
APATHLQDKRSIVERDGVNYTVFEHAATGAKLEFVTNSGICETTSGVNQYSGYLSVGTNMNMWFWFFESRNSPSTAPLAAWFNGGPGCSSMIGLFQENGPCQFYDGASTPSLNPYSFNEYANMIYIDQPIGVGFSYGTDDVTSTVTAAPYVWKLIQAFYASFPAYESREFGLFTESYGGHYGPEFAYYIQQQNAAIASGTVTGDTIDIVALGINNGWIDSALQEKAYIEYSYNNSYKQIITSSQRTSYLSTYTNDCLPAINKCTTGGSNSACSNAADVCYNDIESPIMSDADFDVYDIRQPSNDAYPPETYVTYLQTSSVVKAIGASSTYQECPDAPYNKFATTGDNDRSFLATLSTVVQSGITVLLWAGDADWICNWVGNQYVADAVTWSGQSSFAAQTLTPYTVNGSEVGTFKTLDNLSFLRVYEAGHEVPYYQPATALQAFIQTMQKKALSST

SEQ ID NO: 52 - protein, 354 aa, Nocardiopsis kunsanensis
APAPQNPTEPAEATTMAEALERDLGLNEAEATDLIDAQESALDVDAEATEAAGEHYGGSLFDTETHDLTVLVTDSAAVPGVEAAGAEAAVVEHGVEGLDDLISDLDSAGAQEGVVGWYPEVENDTVVIETLEGADADVDALLSSAGVDPADVRVETTDEAPEVYANIVGGDAYTIGGSSRCSVGFPASDSYGQPGFVTAGHCGTTGSSVSIGNGSGVFSQSVFPGNDAAFVRGTSNFSLTNLVNRYNSGSDVAVSGSTQAPIGSQVCRSGSTTGWHCGTIQARGQTVSYPQGTVRDLTRTSVCAEPGDSGGSFISGSQAQGVTSGGSGNCSWGGTTYYQEVNPMLNSWNLNLST

SEQ ID NO: 53 - protein, 425 aa, Streptomyces parvulus
GTAPSPAAPTAAESLRADAAPPALLRAMERDLGLGREQAERRLGNEAEAGAVAGRLRADLGGDFAGAWVRGAESGTLTVATTDAADVPAIEARGAVAEVVRHSLADLGAAKSRLDRAAAHRDTAEAPVRYVDVRTNTVTVQAVRPSAARALLAAAGVDAGLARVETSAERPRPLYDLRGGEAYYINNSGRCSVGFPVTKGTQQGFATAGHCGRAGASTSGANRVAQGTFQGSVFPGRDMAWVAANSQWTATPYVSGAGGQNVQVAGSTQAPVGASVCRSGSTTGWHCGTIQQHDTSVTYPEGTITGVTRTTVCAEPGDSGGSYISGSQAQGVTSGGSGNCGSGGTTFFQPINPLLQNYGLTLKTTGGGGEDPGEPGEPGGTWAAGTVYRPGDTVTYGGATYRCLQGHQAQRGWEPANVPALWQRV

SEQ ID NO: 54 - protein, 350 aa, Saccharopolyspora endophytica
LTATIADPAGPPVSPELVTAMQRDLGLTADQAVARLGQEAVAARADSALRDALAGSYGGSYFDANLGKLVVGTTDAAKSDEVRAAGAEPRQVDASERQLDGIVEALNGRGAQVPAAVTGWYADVRENAVVVTTQPGTAEQATGFVRDAQVPQESVRVWESPAQPETYADVVGGYAYYTASGARCSMGFAVQGGFVTAGHCGAPGESTTQPTGYFAGSSFPGNDYAFVNTGTDDTGYPLVYNYSSGYVRVSGSAEAPLGSSICRSGSTTGWHCGTVLAKNQSVRYQEGTVSGLTRTNVCAEPGDSGGSFISGNQAQGMTSGGWGDCRTGGETYYQPVREALSAYGLTLLTQ

SEQ ID NO: 55 - protein, 355 aa, Luteus cellwall
ASGPLPQSPSPDSDVATTMAEALERDLNLTSTEAQELLTAQEAAFEADEAAAQAAGDAYGGSVFDTETLDLTVMVTDAAAVQAVEATGAKADVVSYGIDGLDTIIDDLNEADAPEGVVGWYPDIDSDTVVLEVLEGSGADVDALLAEAGVDASAVKVESTTEQPELYADIIGGLAYYMGGRCSVGFAATNASGQPGFVTAGHCGRVGTQVTIGNGRGVFERSVFPGNDAAFVRGTSNFTLTNLVSRYNSGGYATVSGSSVAPIGSSVCRSGSTTGWRCGTIQARGQTVTYPQGTIYNMTRTSACAEPGDSGGSFISGTQAQGVTSGGSGNCSWGGTTFYQEVNPMLNSWNLRLRT

SEQ ID NO: 56 - protein, 406 aa, Saccharothrix australiensis
GPPTTHQEESGLIAAMARDFKITPDQARARLVREAKAATTEQSLKSRLGGHYAGAWLNEGATELVVAVTDAAQAKVVEDAGATPKVVQRSQIQLDELKAKLDANKNAPKDVPAWYVDVKTNSVVVLARNTASAKAFARASGLSEADVRIEQSTEDPRPLIDVIGGNAYYMGSGGRCSVGFSVNGGFVTAGHCGRVGTTTTQPSGTFAGSTFPGRDYAWVRVSSGNTMRGLVNRYPGTVPVKGSNESSVGASVCRSGSTTGWHCGTIQQKNTSVTYPEGTISGVTRTNACAEPGDSGGSWLTGDQAQGVTSGGSGNCSSGGTTYFQPVNPILQAYGLQLVIEGGPTGTTGPTTTSSNPGGTTWQPGVAYTAGTTVTYEGVGYECLQGHTSQIGWEPSAVPALWERVG

SEQ ID NO: 57 - protein, 346 aa, Nocardiopsis baichengensis
DAFPEGTEPLAEAIERDLGVASGQADELLTAEESARSLEKEAEKAAGEAFAGAVFDTETHELTVSVADPSAVEAVEATGAETRVVEASQDELDAAMADLDAASEDGVSEEVTGWHVDLESNTVVVEALEGSEDAAEDLIADAGLDSAPVVVEKADAQPETFGAIVGGDAYYPGNSRCSIGFSVRGGFVTAGHCGSTGTSVSGSAGESGRVAGSVFPGRDMGYVRANSGWTPSPYVNNYRGGRVAVRGSNEASVGASVCRSGSTTGWHCGTIQAKNQTVNYPQGTVRGLTRTTACAEPGDSGGSWLSGNQAQGVTSGGSGNCSWGGTTFFQPVNPILSQWGLSLTTT

SEQ ID NO: 58 - protein, 353 aa, Streptomyces sp.
NDTLTERADAAVAELPAGVLDAMERDLGLSEQEAGLQLVAQYDASLLGETLSADLDAYAGSWLADGTDLVVATTDRAEAAQITEAGAKVEIVDHTLTELESVKAALDEAAESYDTTDAPVWYVDITTNDVVLLTSDTAEAKGFVEAAGVDAGAVSIQTSDEQPQAFYDLVGGDAYYMGGGRCSVGFSVTQGSTPGFATAGHCGTVGTSTTGFNQAAQGTFEESSFPGDDMAWVSVNSNWNTTPTVNDGAVTVSGSTQGAVGASICRSGSTTGWHCGTIEQHNTSVTYPEGTITGVTRTSVCAEPGDSGGSYISGSQAQGVTSGGSGNCTSGGTTYHQPINPLLSAYGLDLVTG

SEQ ID NO: 59 - protein, 353 aa, Actinoalloteichus spitiensis
DTPSPDGADATVASPEMLSAMQRDLGLTEQEALTRVAVEATAVETEDELRASLGPAFGGAHFDGDTNTLVVGVTSAAKADEVRAAGATPEVVAFSADTLDGVVSTLNETSEVPDGVTGWYVDTADNTVVVTTALGSGEAAADFVAESGVNADAVTVVESTEQPRTLYDIIGGDAYYFGGSRCSVGFSVSVGYVTAGHCGGVGTATQGYNRVSSGQVAGSVFPGSDMGYVRTNANWTPRPLVNRYSGGATVTVSGSNEAAVGASICRSGSTTGWRCGTVQAKNQTVFYAQGAVSGLTRTNACAEGGDSGGSWLSGSQAQGVTSGGSGNCTWGGTTYFQPLNPILSRWGLSLTRG

SEQ ID NO: 60 - protein, 338 aa, Byssochlamys verrucosa
FPAAVDVKRAPSSLGITLSQVSNTLIKAVVQNTGRGEVSFIHLNFFKDDAPVKKVAVYRNGSEVQFEGIQRRYKSTGLTRDAFTTLAPGKTAEDVFDIASTCDLISGGPVTIRSEGVVPYATANGIDIAGYIPYSSNELTIDVDGAIASTVSKAIAPLNRRTNISSCSGSEQSTLTMALKNAASLAHAAADAAESGSASKFSEYFKTTASSTRKTVAARLRAVAQEASSSSSGSTTYYCNDAYGYCTTNVLAYTLPSHNTIATCDLYYTNLSALTRTCHAQDQATTSLHEFTHAPGVYSPGTDDLAYGYASSTSLSSSQAVMNADSYALYANAIYVGC

SEQ ID NO: 61 - protein, 339 aa, Hamigera terricola
SPVNVNVGREELPALDVTLSQIGNTQIKAVVKNTGSEDVTFMHLNFFTDSAPVKKVSVFQNNTEVEFQGILRRVKYTDVSTDSVTTLAPGASIEDVFDIATTTDLASGGAVTVKTDGFVPILASAENKVTGYARYTSNELHLDVDGPSAATVSKAIAPLDRRTRLSSCSGSRSSALQTALRNTVSLANAAANAARSGSASKFSEYFKTTSSSVRSTVAARLSAVASEASSTSSGSTTYYCNDPYGYCSTDVLAYTLPSYNIIANCDIYYSYLPALTGSCHAQDQATTTLHEFTHAPGVYSPGTEDYGYGYNAATSLSSSQAVLNADSYALYANAIYLGC

SEQ ID NO: 62 - protein, 334 aa, Aspergillus tamarii
IPVEVPASAPGLDVTLSQVGNTRIKAVVKNTGSEEVTFVHLNFFKDAAPVQKVSLFRNATEVQFQGIKQRLITEGLSDEALTTLAPGATIEDEFDIASTSDLSEGGTITINSNGLVPITTENKVTGYIPFASNELSIDVDAAEAATVSQAVKILDRRTKVTSCSGSRSSALQTALRNTVSLARAAASAAQSGSSSRFQEYFKTTSSSTRSTVAARLNAVANEAASTASGSTTYYCSDVYGYCSSNVLAYTLPAYNIIANCDLYYSYLPALTSTCHAQDQATTTLHEFTHAPGVYSPGTDDLGYGYSAATALSASQALLNADTYALFANAVNLNC

SEQ ID NO: 63 - protein, 334 aa, Aspergillus niveus
LPAKTGEQLQKLDVALSQVDNTLIKAVVKNTGSEDITFVHLNFFRDTAPVKKVSLFRNTTEVPFHGIKQRLRSDGLSADALTVLAPGESIEDEFDIAATSDLSEGGSITISADGFVPIASGNKITGYVPFSSNELSVEVDAAQAASVASAVKPLDRRTKVASCSGSRSSALTQALRNTVSLANAAASAAQSGSSTRFQEYFKTTSSSVRSSVAARFRAVASEASSTSAGSTTYYCTDVYGYCSSNVLAYTLPAYNIIANCDIYYTYLPALTSTCHAQDQATTTLHEFTHAPGVYSPGTDDLGYGYDAATALSSSQALNNADSYALFANAVNLNC

SEQ ID NO: 64 - protein, 372 aa, Penicillium sclerotiorum
IPTGGKKSSFSVDQVAIPATKTKNFADTYARAISKFGGNVPSHVRAAAQQSGAATTTPEANDEEYLTPVNVGGTTLNLDFDTGSADLWVFSEQLPSSEQSGHSVYKPNNGTKLSGATWSISYGDGSSASGDVYKDTVSVGPVKATGQAVEAASKISAQFTRDSNNDGLLGLAFSSINTVKPKAQTTFFDTVKSSLASPLFAVTLKHNAPGTYDFGFVDSSKYTGSLAYTDVDNSQGFWEFTADSYKVGSQSGSSIKGIADTGTTLLLLDDEVVSAYYKQVSGASDSQSAGGYTFDCSADLPDFTVTISGYDAVVPGSLINYAPVSDGSSTCLGGIQSNSGIGFSIFGDIFLKSQYVVFDSNGPRLGFAAQSS

SEQ ID NO: 65 - protein, 371 aa, Penicillium bilaiae
VPTGGKKSFSINQVAIPATKTKNFAGNYAHAIAKYGGNVPSHVEAAAQQSGAATTTPESNDEEYLTPVNVGGTTLNLDFDTGSADLWVFSAELPSAEQSGHALYKPSNGTKLSGASWSISYGDGSSASGDVYKDTVSVGSVKATGQAVEAASKISAQFTKDKNNDGLLGLAFSSINTVKPKAQTTFFDTVKSSLASPLFAVTLKHNAPGTYDFGFIDKSKYTGSLAYADVDNSQGFWEFTADSYSVGSSKGSSIKGIADTGTTLLLLDDEVVSAYYKQVQGAQQDSSAGGYTFDCSSKLPDFTVTISGYDAVVPGDLINFAPASEGSSTCLGGIQSNSGIGFSIFGDIFLKSQYVVFDSNGPRLGFAAQSS

SEQ ID NO: 66 - protein, 373 aa, Penicillium antarticum
SPLVTPRKGFTINQETRAVTKSKTVNLPGVYAQALSKYGATVPQHVHAAAVSGSAVTTPEESDVEYLTPVNVGGTTLNLDFDTGSADLWVFSSELTSSQQSGHSIYKPSSSATKLSGSSWSISYGDGSSASGDVYKDTVTVGGVKATGQAVEAASKISSAFLQDVNNDGLLGLAFSSINTVSPRAQTTFFDTVKSQLDSPLFAVTLKHNAPGSYDFGYIDKSKYTGSLTYANVDDSQGFWSFTASSYKIGTTTGGSITGIADTGTTLLLLPDSVVSAYYKKVSGSQNSNYYGGYVFPCSATLPDFTVTINGYNAVVPGNLINFAQATTGSSTCYGGIQSNSGIGFSIFGDIFLKSQYVVFDSEGPRLGFAAQA

SEQ ID NO: 67 - protein, 370 aa, Penicillium sumatrense
VPTNNVASKFSVNQVSRPATKTTNFAANYGRALSKYGAGVPSHVEAAAAASGSAVTTPESNDVEYLTPVSIGGTTLNLDFDTGSADLWVFSTELSSSEQSGHSVYNPSKSGKKISGASWDISYGDGSGASGDVYTDTVTVGGVTASKQAVEAAKQISSQFQQDTDNDGLLGLAFSSINTVSPTPQKTFFDNVKSSLSQPLFAVALKHNAPGVYDFGFIDSSKHTGSIAYTSVDSSQGFWSFTVDGYKVGSKSGAGFDGIADTGTTLLLLDDSVVSAYYSQVSGAKNDNNAGGYVFDCSADLPDFSVTIGSYTATVPGSLINYGDSGDNSCIGGIQSNSGIGFSIFGDIFLKSQYVVFNANGPKLGFAPQA

SEQ ID NO: 68 - protein, 384 aa, Trichoderma lixii
LPTEGQKTASIEVTYNKNYVAHGPTALFKAKRKYGAPISDNLRAAVAAKHSLTKRQTGSANTNPSDSADDEYITSVSIGTPAQVLPLDFDTGSSDLWVFSSETPKSSASGHVTYSPSKSSTAKKLSGSTWSITYGDHSSSSGDVYTDVVSIGGFSVKTQAIESATKVSTQFVQDTVISGLVGLGFDVGNTVKPRAQKTWFSNAASSLAEPLFTADLRHQETGSYNFGFIDNSLAKGTIGYTPADGSEGYWGFTATGYSVGGAKLGRSSITGIADTGTTLLLLPDNVVDAYYNNVESAQYDDSQEGVVFDCSEDLPSFSFGVGGQTITISGDLLNLTPIEEGSSTCFGGLQSSADIGINIFGDVALKAALVVFDLGNERLGFAQK

SEQ ID NO: 69 - protein, 384 aa, Trichoderma brevicompactum
LPTEGQKTASVEVTYNQNYAAHGPTQLYKAKRKYGAPISDNLKAIVANRKALIKRQTGSAPNHPSDSADDEYITNVSIGTPAQVLPLDFDTGSSDLWVFSSETPKSSASGHTIYTPSKSSTSKKLSGATWSIEYGDKSTSSGDVYTDKVTVGGFSVSTQAVESATKVSAQFVQDTANSGLLGLAFDSINTVSPRQQKTWFSNAANSLAQPLFTANLNHQATGSYNFGFIDTSLASGPINYVPVDNSQGFWGFTASGYSVGGGKLNRSSLSGIADTGTTLLLLPDAVVNAYYANVESAEYDDEQEGVVFDCSEDLPTFSFGVGSGTITIPGDLLNLTPIDSSGQTCYGGLQSSSDIGINIFGDVALKAALVVFDLGNERLGWAQK

SEQ ID NO: 70 - protein, 379 aa, Penicillium cinnamopurpureum
IPTGVPNRKGFTVNQQVRPVTNGTKSKTLNLPAIYANALSKYGVAVPANIKAAAESGTATTTPEDNDIEYLTPVDVGGTTLNLDFDTGSADLWVFSSELPSSESSGHSIYKPSQSGKKLDGYSWKISYGDSSSASGDVYTDTVTVGGVTADGQAVEAAKKISQQFVQDKNNDGLLGLAFSSINTVQPKAQTTFFDTVKDQLDSPLFAVTLKHNAPGSYDFGFIDKSKYTGSLTYADVDKSDGFWAFTADGYSVGSGSSSSSRIKGIADTGTTLLLIDDEIVSAYYKQVDGAQESYSVGGYTFDCSTKLPDFNIKIGDYTAVIPGDVINYAPVQQGSSTCFGGIQSNSGLPFSIFGDIFLKSQYVVFDANGPRLGFAAQA

SEQ ID NO: 71 - protein, 350 aa, Bacillus lichenformis
AQPAKNVEKDYIVGFKSGVKTASVKKDIIKESGGKVDKQFRIINAAKAKLDKEALKEVKNDPDVAYVEEDHVAHALAQTVPYGIPLIKADKVQAQGFKGANVKVAVLDTGIQASHPDLNVVGGASFVAGEAYNTDGNGHGTHVAGTVAALDNTTGVLGVAPSVSLYAVKVLNSSGSGSYSGIVSGIEWATTNGMDVINMSLGGASGSTAMKQAVDNAYARGVVVVAAAGNSGSSGNTNTIGYPAKYDSVIAVGAVDSNSNRASFSSVGAELEVMAPGAGVYSTYPTNTYATLNGTSMASPHVAGAAALILSKHPNLSASQVRNRLSSTATYLGSSFYYGKGLINVEAAAQ

SEQ ID NO: 72 - protein, 360 aa, Bacillus subtilis
FSNMSAQAAGKSSTEKKYIVGFKQTMSAMSSAKKKDVISEKGGKVQKQFKYVNAAAATLDEKAVKELKKDPSVAYVEEDHIAHEYAQSVPYGISQIKAPALHSQGYTGSNVKVAVIDSGIDSSHPDLNVRGGASFVPSETNPYQDGSSHGTHVAGTIAALNNSIGVLGVAPSASLYAVKVLDSTGSGQYSWIINGIEWAISNNMDVINMSLGGPTGSTALKTVVDKAVSSGIVVAAAAGNEGSSGSTSTVGYPAKYPSTIAVGAVNSSNQRASFSSAGSELDVMAPGVSIQSTLPGGTYGAYNGTSMATPHVAGAAALILSKHPTWTNAQVRDRLESTATYLGSSFYYGKGLINVQAAAQ

SEQ ID NO: 73 - protein, 548 aa, Trametes cf versicol
TPTARNLKLHESREEIPAGFSLSGAASPDTTLKLRLALVQSNFAELEDKLYDVSTPSSANYGQHLSKEEVEQLVAPSAESVNAVNAWLTENGLTAQTISPAGDWLAFEVPVSKANELFDADFSVFTHDESGLKAVRTLAYSIPAELQGHLDLVHPTITFPNPNSHLPVVRSPVKPVQNLTSRAVPASCASTITPACLQALYGIPTTKATQSSNKLAVSGFIDQFANSADLKTFLGKFRTDISSSTTFTLQTLDGGSNSQSSSQAGVEANLDIQYTVGLASAVPTIFISVGDDFQDGDLEGFLDIINFLLNESAPPQVLTTSYGQNENTISAKLANQLCNAYAQLGARGTSILFASGDGGVSGSQSSSCSKFVPTFPSGCPFMTSVGATQGINPETAADFSSGGFSNVFARPSYQSTAVSSYLTALGSTNSGKFNTSGRAFPDIATQGVDFEIVVSGRTEGVDGTSCASPTLAAIISLLNDRLIAAGKSPLGFLNPFLYSAAGTAALTDITSGSNPGCNTNGFPAKAGWDPVTGLGTPNFAKLLTAVGL

SEQ ID NO: 74 - protein, 439 aa, Bos taurus
MAKEYFPFTGKIPFEGKDSKNVMAFHYYEPEKVVMGKKMKDWLKFAMAWWHTLGGASADQFGGQTRSYEWDKAECPVQRAKDKMDAGFEIMDKLGIEYFCFHDVDLVEEAPTIAEYEERMKAITDYAQEKMKQFPNIKLLWGTANVFGNKRYANGASTNPDFDVVARAIVQIKNSIDATIKLGGTNYVFWGGREGYMSLLNTDQKREKEHMATMLGMARDYARAKGFKGTFLIEPKPMEPSKHQYDVDTETVIGFLKAHGLDKDFKVNIEVNHATLAGHTFEHELACAVDAGMLGSIDANRGDAQNGWDTDQFPIDNFELTQAMLEIIRNGGLGNGGTNFDAKIRRNSTDLEDLFIAHISGMDAMARALMNAADILENSELPAMKKARYASFDSGIGKDFEDGKLTFEQVYEYGKKVEEPKQTSGKQEKYETIVALHCK

SEQ ID NO: 75 - protein, 591 aa, Saccharomyces cerevisiae
MLCSVIQRQTREVSNTMSLDSYYLGFDLSTQQLKCLAINQDLKIVHSETVEFEKDLPHYHTKKGVYIHGDTIECPVAMWLGALDLVLSKYREAKFPLNKVMAVSGSCQQHGSVYWSSQAESLLEQLNKKPEKDLLHYVSSVAFARQTAPNWQDHSTAKQCQEFEECIGGPEKMAQLTGSRAHFRFTGPQILKIAQLEPEAYEKTKTISLVSNFLTSILVGHLVELEEADACGMNLYDIRERKFMYELLHLIDSSSKDKTIRQKLMRAPMKNLIAGTICKYFIEKYGFNTNCKVSPMTGDNLATICSLPLRKNDVLVSLGTSTTVLLVTDKYHPSPNYHLFIHPTLPNHYMGMICYCNGSLARERIRDELNKERENNYEKTNDWTLFNQAVLDDSESSENELGVYFPLGEIVPSVKAINKRVIFNPKTGMIEREVAKFKDKRHDAKNIVESQALSCRVRISPLLSDSNASSQQRLNEDTIVKFDYDESPLRDYLNKRPERTFFVGGASKNDAIVKKFAQVIGATKGNFRLETPNSCALGGCYKAMWSLLYDSNKIAVPFDKFLNDNFPWHVMESISDVDNENWIAIIPRLSP

SEQ ID NO: 76 - protein, 444 aa, Bacillus subtilis
ETANKSNELTAPSIKSGTILHAWNWSFNTLKHNMKDIHDAGYTAIQTSPINQVKEGNQGDKSMSNWYWLYQPTSYQIGNRYLGTEQEFKEMCAAAEEYGIKVIVDAVINHTTFDYAAISNEVKSIPNWTHGNTQIKNWSDRWDVTQNSLLGLYDWNTQNTQVQSYLKRFLERALNDGADGFRFDAAKHIELPDDGSYGSQFWPNITNTSAEFQYGEILQDSASRDAAYANYMDVTASNYGHSIRSALKNRNLGVSNISHYAYDVSADKLVTWVESHDTYANDDEESTWMSDDDIRLGWAVIASRSGSTPLFFSRPEGGGNGVRFPGKSQIGDRGSALFEDQSITAVNRFHNVMAGQPEELSNPNGNNQIFMNQRGSHGVVLANAGSSSVSINTPTKLPDGRYDNKAGAGSFQVNDGKLTGTINARSVAVLYPDDIEIRCNTFFQ

SEQ ID NO: 77 - protein, 476 aa, Saccharomycopsis fibuligera
QPVTLFKRETNADKWRSQSIYQIVTDRFARTDGDTSASCNTEDRLYCGGSFQGIIKKLDYIKDMGFTAIWISPVVENIPDNTAYGYAYHGYWMKNIYKINENFGTADDLKSLAQELHDRDMLLMVDIVTNHYGSDGSGDSIDYSEYTPFNDQKYFHNYCLISNYDDQAQVQSCWEGDSSVALPDLRTEDSDVASVFNSWVKDFVGNYSIDGLRIDSAKHVDQGFFPDFVSASGVYSVGEVFQGDPAYTCPYQNYIPGVSNYPLYYPTTRFFKTTDSSSSELTQMISSVASSCSDPTLLTNFVENHDNERFASMTSDQSLISNAIAFVLLGDGIPVIYYGQEQGLSGKSDPNNREALWLSGYNKESDYYKLIAKANAARNAAVYQDSSYATSQLSVIFSNDHVIATKRGSVVSVFNNLGSSGSSDVTISNTGYSSGEDLVEVLTCSTVSGSSDLQVSIQGGQPQIFVPAKYASDICS

SEQ ID NO: 78 - protein, 487 aa, Debaryomyces occidentalis
QPIIFDKRDVGSSADKWKDQSIYQIVTDRFARSDGSTTADCLVSDRKYCGGSYKGIIDKLDYIQGMGFTAIWISPVVEQIPDNTAYGYAYHGYWMKNIDELNTNFGTADELKQLASELHSRSMLLMVDVVYNHYAWNGDGSSVDYSSFTPFNQQSYFHDYCLITNYNDQTNVEDCWEGDTEVSLPDLSTEDNEVIGVFQTWVSDFVQNYSIDGLRIDSAKHVDTASLTKFEDASGVYNLGEVYQGDPTYTCPYQSYMKGVTNYPLYYPVYRFFSDTSATSSELTSMISTLQSSCSDVSLLGNFIENHDQVRFPSVTSDTSLIKNAMAFIILGDGIPIIYYGQEQGLNGGSDPANREALWLSGYNTDSEYYELISKLNQIRNQAIKKDSAYSTYKSSVVSSSDHYIATRKGSDANQLISIFNNLGSNGSQDITVSNTGYSSGDKVIDIISCNSVSAGDFGSLSVSISGGMPQVYAPSSVLSGSGICNQ

SEQ ID NO: 79 - protein, 487 aa, Debaryomyces occidentalis
KPIFLSKRDAGSSAAAAWRSESIYQLVTDRFARTDGSTSATCNTGDRVYCGGTFQGIIDKLDYIQGMGFTAIWISPVVEQIPDDTGYGYAYHGYWMKDIYAINSNFGTADDLKNLSNELHKRNMKLMVDIVTNHYAWNGAGSSVAYSNYNPFNQQSYFHDYCLITNYDDQTNVEDCWEGDNTVSLPDLRTEDSDVSSIFNLWVAELVSNYSIDGLRIDSAKHVDESFYPSFQSAAGVYLLGEVYDGDPAYTCPYQNYMSGVTNYPLYYPMLRFFQGTSNSVDELNAMISSLESDCKDITLLGNFIENHDQPRLPSYTSDSALIKNAIAFNLMSDGIPIIYYGQEQGYSGSSDPNNREALWLSGYSTSNGYYKLISSVNQIRNQAIYKDSKYTTYWSDVLYASGHVIALQRGADDQRIVSVFNNLGSSGSQTVTFSTKYSGGEKVVDVLTCQTSYANSDSTLTVSISGGAPRIYAPASLIANSGICNF

SEQ ID NO: 80 - protein, 570 aa, Lipomyces kononenkoae
MCGSTLSASLYVYNDDYDKIVTLYYLTSSGTTGSTLALILPVWSNNWELWTLSAIAAGAVEITGASYVDSDTSVTYTTSLDLPLTTTSASVPTGTAANWRGRSIYQVVTDRFARTDGSITYSCDVTDRVYCGGSYRGIINMLDYIQGMGFTAIWISPIVENIPDDTGYGYAYHGYWMKDIFALNTNFGGADDLIALATELHNRGMYLMVDIVVNHFAFSGNHADVDYSEYFPYSSQDYFHSFCWITDYSNQTNVEECWLGDDSVPLVDVNTQLDTVKSEYQSWVKQLIANYSIDGLRIDTVKHVQMDFWAPFQEAAGIYTVGEVFDGDPSYTCPYQENLDGVLNYPVYYPVVSAFQRVGGSISSLVDMIDTLKSECIDTTLLGSFLENQDNPRFPSYTSDESLIKNAIAFTILSDGIPIIYYGQEQGLNGGNDPYNREALWPTGYSTTSTFYEYIASLNQIRNHAIYIDDTYLTYQNWVIYSDSTTIAMRKGFTGNQIITVLSNLGSSGSSYTLTLSNTGYTASSVVYEILTCTAVTVDLSGNLAVPMSGGLPRVFYPESQLVGSGICSM

SEQ ID NO: 81 - protein, 476 aa, Lipomyces kononenkoae
KTAAEWKELSIYQVITDRFATTNLTAPDCWIRAYCGGTWKGLERKLDYIQNMGFDAVWISPVIHNIEVNTTWGFAFHGYWGDDPYRLNEHFGTAADLKSLSDSLHARGMSLMVDVVINHLASYTLPQDVDYSLYPAPFNTSSAFHQPCPIDFSNQSSIEDCWLVTEPAPALVDLKNEDQVILDALINSVVDLVETYDIDGIRLDTARHVPKPSLAKFQEKVGVFVTGEALNQSVPYVAQYQGPLNSAINYPLWYALVDSFMGRTTFDYLESVVKSEQATFSDAHALTNFLDNQDQPRFASYLGDGNGDDVLRDENAATFLFFVSGIPVIYYGFEQRFDGGFDPVNREPMWTSGYNTSTPLYNYLARLNAIRKYAASITGTQVFYSDDTVFLGSGVSHMAMQRGPLVIVLTNVGQHIIDNTGYTVTGSQFSAGDSLTDLVSCTKVKVVGANGTFTSPSNGGKARIWIKSKYAGKFCS

SEQ ID NO: 82 - protein, 626 aa, Bacillus subtilis
ETANKSNELTAPSIKSGTILHAWNWSFNTLKHNMKDIHDAGYTAIQTSPINQVKEGNQGDKSMSNWYWLYQPTSYQIGNRYLGTEQEFKEMCAAAEEYGIKVIVDAVINHTTSDYAAISNEVKSIPNWTHGNTQIKNWSDRWDVTQNSLLGLYDWNTQNTQVQSYLKRFLDRALNDGADGFRFDAAKHIELPDDGSYGSQFWPNITNTSAEFQYGEILQDSASRDAAYANYMDVTASNYGHSIRSALKNRNLGVSNISHYASDVSADKLVTWVESHDTYANDDEESTWMSDDDIRLGWAVIASRSGSTPLFFSRPEGGGNGVRFPGKSQIGDRGSALFEDQAITAVNRFHNVMAGQPEELSNPNGNNQIFMNQRGSHGVVLANAGSSSVSINTATKLPDGRYDNKAGAGSFQVNDGKLTGTINARSVAVLYPDDIAKAPHVFLENYKTGVTHSFNDQLTITLRADANTTKAVYQINNGPETAFKDGDQFTIGKGDPFGKTYTIMLKGTNSDGVTRTEKYSFVKRDPASAKTIGYQNPNHWSQVNAYIYKHDGSRVIELTGSWPGKPMTKNADGIYTLTLPADTDTTNAKVIFNNGSAQVPGQNQPGFDYVLNGLYNDSGLSGSLPH

SEQ ID NO: 83 - protein, 483 aa, Bacillus subtilis
VNGTLMQYFEWYTPNDGQHWKRLQNDAEHLSDIGITAVWIPPAYKGLSQSDNGYGPYDLYDLGEFQQKGTVRTKYGTKSELQDAIGSLHSRNVQVYGDVVLNHKAGADATEDVTAVEVNPANRNQETSEEYQIKAWTDFRFPGRGNTYSDFKWHWYHFDGADWDESRKISRIFKFRGEGKAWDWEVSSENGNYDYLMYADVDYDNPDVVAETKKWGNWYANELSLDGFRIDAAKHIKFSFLRDWVQAVRQATGKEMFTVAEYWQNNAGKLENYLNKTSFNQSVFDVPLHFNLQAASSQGGGYDMRRLLDGTVVSRHPEKAVTFVENHDTQPGQSLESTVQTWFKPLAYAFILTRESGYPQVFYGDMYGTKGTSPKEIPSLKDNIEPILKARKEYAYGPQHDYIDHPDVIGWTREGDSSAAKSGLAALITDGPGGSKRMYAGLKNAGETWYDITGNRSDTVKIGSDGWGEFHVNDGSVSIYVQK

SEQ ID NO: 84 - protein, 589 aa, Bacillus subtilis
MMEYAAIHHQPFSTDAYSYDGRTVHIKIRTKKGDADHIRFIWGDPYEYNDGKWSANEQPMRKIAATEMHDYWFAEVVPPFRRLQYAFVVTDDHEDIFFGSSGVCPYNEKTLETIHYYFKFPFVHEADTFQAPEWVKSTVWYQIFPERFANGREDLSPKNALPWGSKDPGVNDFFGGDLQGIVDKLDYLEDLGVNGIYLTPIFSAPSNHKYDTLDYFSIDPHFGDPEIFRTLVSQLHQRGMRIMLDAVFNHIGSASPQWQDVVKNGDQSRYKDWFHIHSFPVTDDNYDRFAFTADMPKLNTANPEVQKYLLDIALYWIREFDIDGWRLDVANEVDHVFWKTFRQAVSTEKPDVYILGEIWHSAEPWLRGDEFHAAMNYPFTEPMIEYFADQTISASRMAHRVNAHLMNGMKQANEVMFNLLDSHDTKRLLTRCRNDEKKARALLAFMFAQTGSPCIYYGTEIGLDGENDPLCRKCMVWEKEKQNQDMLQFMKRLIALRKQENTLLTEGHLEWNLLDDKNDFISFSRTLDEKILIYFFNQGNVVQHISLRELNIDRNNKICDAWTEQPLHYHDVIAVQPGEFLILSAAAPV

SEQ ID NO: 85 - protein, 483 aa, Bacillus lichenformis
ANLNGTLMQYFEWYMPNDGQHWKRLQNDSAYLAEHGITAVWIPPAYKGTSQADVGYGAYDLYDLGEFHQKGTVRTKYGTKGELQSAIKSLHSRDINVYGDVVINHKGGADATEDVTAVEVDPADRNRVISGEHLIKAWTHFHFPGRGSTYSDFKWHWYHFDGTDWDESRKLNRIYKFQGKAWDWEVSNENGNYDYLMYADIDYDHPDVAAEIKRWGTWYANELQLDGFRLDAVKHIKFSFLRDWVNHVREKTGKEMFTVAEYWQNDLGALENYLNKTNFNHSVFDVPLHYQFHAASTQGGGYDMRKLLNGTVVSKHPLKSVTFVDNHDTQPGQSLESTVQTWFKPLAYAFILTRESGYPQVFYGDMYGTKGDSQREIPALKHKIEPILKARKQYAYGAQHDYFDHHDIVGWTREGDSSVANSGLAALITDGPGGAKRMYVGRQNAGETWHDITGNRSEPVVINSEGWGEFHVNGGSVSIYVQR

SEQ ID NO: 86 - protein, 478 aa, Aspergillus niger
ATPADWRSQSIYFLLTDRFARTDGSTTATCNTADQKYCGGTWQGIIDKLDYIQGMGFTAIWITPVTAQLPQTTAYGDAYHGYWQQDIYSLNENYGTADDLKALSSALHERGMYLMVDVVANHMGYDGAGSSVDYSVFKPFSSQDYFHPFCFIQNYEDQTQVEDCWLGDNTVSLPDLDTTKDVVKNEWYDWVGSLVSNYSIDGLRIDTVKHVQKDFWPGYNKAAGVYCIGEVLDGDPAYTCPYQNVMDGVLNYPIYYPLLNAFKSTSGSMDDLYNMINTVKSDCPDSTLLGTFVENHDNPRFASYTNDIALAKNVAAFIILNDGIPIIYAGQEQHYAGGNDPANREATWLSGYPTDSELYKLIASRNAIRNYAISKDTGFVTYKNWPIYKDDTTIPMRKGTDGSQIVTILSNKGASGDSYTLSLSGAGYTAGQQLTEVIGCTTVTVGSDGNVPVPMAGGLPRVLYPTEKLAGSKICSSS

SEQ ID NO: 87 - protein, 477 aa, Aspergillus niger
ATPADWRSQSIYFLLTDRFARTDGSTTATCNTADQKYCGGTWQGIIDKLDYIQGMGFTAIWITPVTAQLPQTTAYGDAYHGYWQQDIYSLNENYGTADDLKALSSALHERGMYLMVDVVANHMGYDGAGSSVDYSVFKPFSSQDYFHPFCFIQNYEDQTQVEDCWLGDNTVSLPDLDTTKDVVKNEWYDWVGSLVSNYSIDGLRIDTVKHVQKDFWPGYNKAAGVYCIGEVLDGDPAYTCPYQNVMDGVLNYPIYYPLLNAFKSTSGSMDDLYNMINTVKSDCPDSTLLGTFVENHDNPRFASYTNDIALAKNVAAFIILNDGIPIIYAGQEQHYAGGNDPANREATWLSGYPTDSELYKLIASRNAIRNYAISKDTGFVTYKNWPIYKDDTTIPMRKGTDGSQIVTILSNKGASGDSYTLSLSGAGYTAGQQLTEVIGCTTVTVGSDGNVPVPMAGGLPRVLYPTEKLAGSKICYG

SEQ ID NO: 88 - protein, 431 aa, Streptomyces avermitilis
SPPGTKDVTAVLFEWKFDSVARECTNTLGPAGYGYVQVSPPAEHIQGSQWWTSYQPVSYKIAGRLGDATAFQNMINTCHTAGVKVVVDTVVNHMSAGSGTGTGGSAYTKYNYPGLYSSYDMDDCTATITDYTNRANVQNCELVGLADLDTGEEYVRKTIAGYMNTLLGYGADGFRVDAVKHIPAADLANIKSRLTNPSVYWKQEVIYASGEAVQPTEYTGNGDVQEFRYAYDLKRVFNNENLAYLKNYGEGWGYLNSSVAGVFVDNHDTERNGSTLNYKDGANYTLANVFMLAYPYGAPDINSGYEWSDADAGPPGGGTVNACWQDGWKCQHAWPEIKAMVAFRNATRGESVTNWWDNGGDAIAFGRGAKGYVAINHESGSLTRTYQTSLTAGTYCNVQNNTGVTVDSSGRFTATLGANTALALYSGKSTC

SEQ ID NO: 89 - protein, 643 aa, Clostridium phytofermentans
MYTLKSKLRDLYRHPVGYDVINKILLQAGLSKGLIENPVIGALPLSFLNRIAGKKLGNGFFDALLALLNQSNDRLDPYSSKDKKITPTWWKEAVFYQIYPRSFMDGNGDGVGDLPGIISKLDYLKELGVDALWLSPIYDSPGDDNGYDIRDYQKIDSQFGTMEDFDLLLTELHARNMRLVMDLVVNHTSDEHHWFKEALKSSESTYRDYYFLRKEPNNWTSFFSGSAWNHYPEEDLWGLHLFSKKQMDLNWENPKLRQDIYQMIRWWLEKGVDGFRLDVINYISKETGLPDGDSFIGNLMGFTGIEHYFYGPKLHNHLQEIQKEAFTPYQAFSVGETPGIGMKMGKLLTDDSRGELNMMFSFDHLETSGHARFDQYEYDLNYYKSYIMDWMENFADTSWMSLFYDNHDNPRMLSKVDHTHTHRQELAKMLAMIQMTLKGTPFLYQGQELGMINKDFHEISNFRDVESINKYKELCEKMPKEEAFLQILAGSRDHARTPMQWSAKPGCGFSNAVPWIDSDGDELVCNAEIQMQDSESVLSFYRDLIALRRKTPALIYGDIEFTHKKRKDILIYTRYLEGETYLIICNLSNDEQKLPGNVPVSESLEGLESLSASADERKGLVLCNYPAKVMKSLRAYEGRVYRI

SEQ ID NO: 90 - protein, 1016 aa, Clostridium phytofermentans
ATDTITIHYHRDDGDYEKWNLWLWAEGKDGAAYYFDGEDAFGPYVSVSLDKSADRIGFIVRTDSWEKDVSEDRFIDTSLGDEIWISSGESTFSYEAPEGYEKEVSIESFQLKLNYLRYDEEYTDISFRLTFEDGTTDFLTKEHMRIENGILKAEKEVKYGKKITLDVLKNGLEEDYQGVSFSTAKIDEESKLEMYWMQGTGTISPKADFIKRSKEIESALITSMKEITVKLSVPCRVDDIKQDGFKLSPKLAVSKVEATSTRDSEYKTIKEGYADTFIITMEEPLDMSKKYALSKTDYGSRNLTLDSGLYTSEEFEAAYTYEGNDLGATYSKEKTVFKVWSPSAESISVLFYPHGEAKDGEKPEITYPMKQTGAGVWQAEIEGDLKNKYYVYQVTVDGKTKLVVDPYAKAAGVNGERGMVIDLSETDPDGFREHSSPEFKNPVDAVIYEIHVRDLSMNENSGIENKGKFLGFTETGTTNSAGLSTGLDHMKELGVTHVHLLPSFDYKTIDESKLGENKFNWGYDPQNYNLPEGSYTTDPYQGEVRVREYKEMVQALHENGLHVVMDVVYNHTYTAGDSNFTSLVPGYYYRTDINGNFTNGSGCGNETASERAMVRKFIVDSVVYWATEYKVDGFRFDLMGLHDIETMNMVREALDKIDPSILLYGEGWTGGSTPLPDSKQAIKNNAVELNERIACFSDDIRDAIKGSVFDASDTGFINSGKRNVSNRDESIKFGIVASVSHPQVNLSGVPYSSRFWANEPSQTINYASAHDNLTLWDKLLETNKMASKEELVQMNKLSAAIVLTSQGIPFFQAGEEMARTKKGNDNSYQSPDSINMLNWDNKTEYKDLFEYYKGLIALRKTYDAFRMQTAEEIQQKLEFVDSDSSVIAYRIHDAVKDGREIALIFNGTLEEKEVVLSANAWDVLVNQDTAGTDVIETITGGTIKVPAKSTLVLLENKDAVIKGDKDAVKGDEIQELPTNMQEVAEKESGNAWLWVGIATVCVLAGGVLFWILKRKR

SEQ ID NO: 91 - protein, 554 aa, Clostridium phytofermentans
MKNTNTLHPWWESAAAYQIYPRSFMDSNGDGVGDLQGIISRLPYLSELGFDLIWICPIYPSPNDDNGYDISDYQNIQKEYGTMEDFEELLHKAHERGIRVIMDLVVNHTSSSHPWFIESRSSKDNPKRDWYIWKDGKDNVEPNNWESIFGGSTWEYDEKSGQYFLHVFGKTMPDINWENTQVKKAIFDMICWWLDKGIDGFRVDAISHIKKPDFNDMPNPKNERYVSSFDKHMNQSGILDLLNELKENAFSKYDIFTVAEANGVRIEEIEEWVSSEKGIFNSLFQFDHLNLWNVGSEEGKISIKKLKNALTKWQKAAPMDGNVALVMENHDLVRSISRFGSEDKYWKESAKCLALMYYMQKGVPFIYQGQEIGMLNADYESHLDFRDDPTLFAYQDRINNGMSPAESLQVLKKSSRDNSRTPMQWDASPHAGFTTGTPWMKVNQNYHWLNAEVQKEDEDSILNFYKKLIKIKKETTGLIYGDYKLLMEESESIYAYTREYEEKNYLVVCNLSEELSELQIDLDITKGEILISNYEDRNSKEMLLKPYECRLYSL

SEQ ID NO: 92 - protein, 538 aa, Clostridium phytofermentans
MVKKWWHSSVVYQIYPRSFNDSNGDGIGDLKGIIEKLDYLKNLGIDVIWLSPVFKSPNDDNGYDISDYEDIMDEFGTLEDMELLLKEANNRGIKILMDLVANHTSDEHKWFIESRKSKDNAYRDYYIWRDPVDGHEPNDLGSTFSGSAWEWDEATGQYYLHLFSKKQPDLNWENPIVREEVWKSMNFWIDKGIGGFRMDVIELLGKIPDEKIISNGPMLHEYIREMNRNSFGDKDLLTVGECWGATPEIAKMYSNPDGSELSMVFQFEHIGLDQIPGKDKWDLQPLNLIDLKNVFHKWQTCFHDDGWNSLFWNNHDTPRIVSRWGNDKVYKIESAKMLATLLHGLKGTPYIYQGEELGMANIKFKDINQYKDIETLNMYKDRLNKGYKHEDIMESIYAKGRDNARTPMQWSDEIDGGFTTGTPWIEVNPNFTEINAKEQVSNPNSIYNYYKKLIEIRKNNEVIVYGDFEMLLPEDKNIFAYVRTLKDSKIVVVCNFYENEVEYNIPKEYEEKKEVLISNYGLSLTGRLRPFEAIMYRV

SEQ ID NO: 93 - protein, 555 aa, Clostridium phytofermentans
CKKADVNQNPSELNQDESQKEKEENDDEGTPEVSQDETKAVIPYDYVQNLNIIDDNYRNFYEIFVYSFYDSNGDGIGDINGVISKLDYINDGNDATDSDLGFNGIWLMPIMPSTTYHKYDVTDYYNIDPQYGTLEDFKNLVSECHKRGIHLIIDFVFNHTSAKHPWFLEAVSYLESLKEGEEPDLEKCPYVGYYHFTKDYNGSKTYYKAGTSNWYYEGVFWDQMPDLALENENVRKEIEDIAKYWLDLGVDGFRLDAAKEYFSGEKERNIEVLKWFSDYVKSVKEDADIVAEVWDEEGTIAAYYESGIPSLFNFPLSQHNGLITNTARKLGTSSGKNFAKTLLRLDEKYKEGNPKYIDAPFISNHDTTRISAQCVNDEDQMKMSAGMLLTMNGSPYVYYGEEIGMNSKGTKDENKRLPMQWSATDTTGITTPPANADSVEQKFPPVDEQMKDPLSLYNYYKRAVRIRNENPEIARGDMSVIEELCTKDISAIKKVYQGSEIVILYNINTESANILLKDAGLTELNIRGYLSVDGNAVTMSDGVVSMPKYSIVILK

SEQ ID NO: 94 - protein, 583 aa, Clostridium phytofermentans
MKFEAIYHRTSDNYCYPLNEEDLIINIKTGHDIERVFIYYGDPFEGGILGGNWTWNGVEEELIYKKNLTHHIWWTTTVKPKFKRCKYYFKLVANDTSYYYFEDGFYTEAEMNHQDKNLVYFTFPWMNSIDINKTPDWVNDTVWYQIFPERFNNGDKENDPKNVKAWGFHTVSNDEFYGGDLQGIINRLDYLADIGISGIYLTPIFEANTSHKYDTKDYMKIDPHFGDEKVFKNLVDTAHEKGIRIMLDGVFNHCGNQFAPWLDVLKNGPDSKYFNWFMINKWPFNKEDHNTNDGSFYSFAFTSRMPKLNTNNPEVIKYLLDVVEYWVKNFDIDGIRLDVANEISHRFCKDLRKLTKELKPDFYILGELWHDAITWLHGDEFDGVMNYPLATSLADYWVYPEKTNYDFECAINHNFTMYMQQTNDVLFNLLDSHDTNRLIDKVKDIDIFYQQLAVLFTMPGSPCIYYGTEIAMEGSYDPDCRRCMPWEDIDAGLFKDRIEIIKALIHLRKTNNAFKSRHYHFIEDKNNNRVIHYIKTDEDHKQVEVILNCSKDSIVVQRKGNELFSLLNEDTILKPKGVFIQQI

SEQ ID NO: 95 - protein, 575 aa, Clostridium thermocellum
MKLEAIYHKPYSEFAFPVAPDTLVIRLRTAKNDVNTCILIYHEKYDTSQRGKVKMDKVASDGMFDYYEVELNVGIKRIKYMFYLEDNYSIKWYSSDGFFDYMPQWGHFTYSYICKDDIFHEVEWFRNSTIYQIFPDRFAKFPPDTENSGKRTIHGGNIKGIIDRFDHLVKLGVDVVYLNPIFKSESYHRYDVVDYYEIDPMFGSKEELRELMDLCHKNGIKVIFDGVFNHSGDKFFAFRDVVEKGEKSKYANWYFINSFPVQGYPRPNYECFSFYGGMPKLNTGNPETAKYFLDVVKYWTVEFGVDGWRLDAADEVDRKFWRKLRDMLKDLNKDVVLIGEIFDEASSWLWGDQFDSVINYPLKAMINDLFAYRSIDVETFRNRISGYIMKFNKKVLSSLVNIISTHDTPRFLTLCNGDEKRFEMAVVFQFTFPGVPLIYYGDEIGMEGEGDPDCRRPMIWDEAKWNKKTLELYKFLIGLRKRFDALRTGEYGELPVTGCNGILAYRRGRGENGIIVAMNTLDRKENVVVETGDSFDTVKAFESLKDEERLNVDKKRINICLNPFEWRIYKACGEL

SEQ ID NO: 96 - protein, 655 aa, Thermobifida fusca
MIGRFPILDVSPVVDIGTAKAVVGETFPVRATVFREGHEALGAGVVLYTPEGQRQPLVPLREIAPGTDRYEAEVTVTSEGLWHFAIEAWSDPYATWCHDARIKIPAGQDVELMLEEGARLLERAARRVPRRPALAEIAAAMRDGSRSAHERLDLALSDLVRDELAERPLRELVTRSQRFPVMVSRRRALFGSWYEFFPRSEGAVLDTEDGEPRSGTFATAARRLPAIADMGFDVVYIPPIHPVGYSFRKGRNNSTVAQPGDPGSVWAIGSHEGGHDAIHPDLGTIDDFDAFVARARELGLEIAMDLALQASPDHPWVKEHPEWFTVRADGSIAYAENPPKKYQDIYPINFDKDPEGIFTEVRRIVRYWMSHGVRIFRVDNPHTKPVAFWERLLADIAATDPDVIFLSEAFTRPAMMHTLAKIGFHQSYTYFTWRNTKQELEEYLTELTGEAAAYMRPNFFVNTPDILHAYLQHGGRPAFEVRAILAATLSPTWGMYSGYELCENRALKPGSEEYLDSEKYQYKPRDWEAAEAAGITITPLIRKLNSLRRSHPALQELRNLRFHYADQPEIICYSKRLAGANHGADDTILVVANLDPHHTREATVWLDMPALGFAPGDHITVTDQLSGHSYHWVEANYVRLDPHVQTAHIFTVAPA

SEQ ID NO: 97 - protein, 572 aa, Thermobifida fusca
APSGNRDVIVHLFQWRWKSIADECRTTLGPHGFGAVQVSPPQEHVVLPAEDYPWWQDYQPVSYKLDQTRRGSRADFIDMVNTCREAGVKIYVDAVINHMTGTGSAGAGPGSAGSSYSKYDYPGIYQSQDFNDCRRDITNWNDKWEVQHCELVGLADLKTSSPYVQDRIAAYLNELIDLGVAGFRIDAAKHIPEGDLQAILSRLKNVHPAWGGGKPYIFQEVIADSTISTGSYTHLGSVTEFQYHRDISHAFANGNIAHLTGLGSGLTPSDKAVVFVVNHDTQRYEPILTHTDGARYDLAQKFMLAHPYGTPKVMSSYTWSGDDKAGPPMHSDGTTRPTDCSADRWLCEHRAVAGMVGFHNAVAGQGIGSAVTDGNGRLAFARGSAGYAAFNATNTAWTRTFTTSLPDGVYCDVANGTFVDGVCDGPSYQVSGGKFTATVPANGAVALHVEAPGSCGPDGCGTPPGGGDDCTTVTARFHATVTTWYGQEVAVVGSIPELGSWQPAQGVRLRTDSGTYPVWSGAVDLPAGVGFEYKYVKLNPDGTVEWEQGGNRIATVDDSGGGCSQNFYDSWR

SEQ ID NO: 98 - protein, 825 aa, Anaerocellum thermophilum
MLVRAYIDDFNEIVVVLSQMVHSVKKEDFKVFLNEEEIDIEKIDKIIPHSDNPAEAETRGYEICEQKGKIRFVLKEGHFDYHRKPYKKPVFVIGEMNDWQISPEWEMTYSKLRGRYELIKDLKEIKIGQKFKFAEGASQKLWYPPGFGNDIVITEYFDRETAFTNMIRIIPSNRLLPNLKYKVVYKSEHIWARPREILTRPEFFYPGELGIKYEPYGTYFKLWAPTAYKVKVKVFDESENFRFEKEMARSENGTWNIYLTGDLKNHYYLYEVWHYNYDEDEGFIVYEVPDPYSKASSSNSQKSFIFDPADTLIEGWQQDEFVKTIEKQQDAIIYEMHVRDFTIDKNSGVDEKFRGKFLGLCQKSFYKEKFSTGLLHLKELGITHIHLLPISDFGSVDDKNPDKKYNWGYDPVLYQCPEYWYSTKSGGIEALKELKTMIKTLHQNGIGVVMDVVFNHTYHTKGGKFSIFDKIVPGYFYRIDDYGDYSNATGCGNEIATEKPMVRKFILDTIIYWTEDFHIDGFRFDLMGLIDTLTMRMIAKEVRKRNPYALIYGEGWVMGDSMCLLEERATIESTAHHGYSIGLFNDRIRDSIRGDLDGFKTGYMHGNLSDIERLKQGIRAAIDDFAKEPDECVNYVSCHDNLTLFDKAQKTMVGEDIFWIDRVCRLANAIILTSQGIPFLHGGVEFNRSKGGHPNTYNAGDNINKIDWSLKEKFYDTFKFYCDLIKLRKEHVAFRMRSSGEIRKYLKFLPAPDGIVAFLISYPYDAWKKIIVAYNPFKEKKVITLPEGVWKIKANDGIIFSEENELEAIGSFEISPVSLFIAYQK

SEQ ID NO: 99 - protein, 1104 aa, Anaerocellum thermophilum
DEKTTLIIHYYRYNEDYQGWNLWIWPVEPVGAEGKAYEFTSKDDFGVKAVVELPGKVTKVGIIVRKGNWEAKDVAVDRFISGISGSKEVWLIEGEEQIYTSQPQKTPKMTAFIDGLNTIVVKLAKKADILSNNRTQGFKVTAFYEEVPIKKVEPVLPKINKNFKPEEAGYELIDGGTKVKFILKPGAGDFKFTDTSGKLDVYVSGTMNDWGGTASSEGKYKPLPAWKMTWNAEKGYYELVKELGKDGVVIGAKFKFTSWDGTSAKWYPDGMGNDKVIEELYTGNEKITKVDTFKITTEDELEPQVPYVVSKDSFKPTVAQARNILDNPKYYYKGNDLGCTYTKAYSAFRLWAPTAIGVILRLYDDYKTTKYKEYEMQQSFNGTWYLKINGDLKGKYYQYEVWHASNSITDDTIRKYVVPDPYSRATSANSERTLIFDPKDTNPVGWEKDTFVTLKNQEDAIIYETHVRDFTIDASSGVRPEFRGKYLGFTQTGAKGPNGVKTGIDHLKELGITHVHLLPTYDFGSIDETNPDKGYNWGYDPVLYQNVEGSYATNPNTIVRIKEYKQMVMALHKAGIGIIQDVVFNHTFQIGDAKFSIFDKIVPGYFYRKDKDGNYSNASGCGNEIATEKPMVRKFIIDTLTYLTKEYHIDGFRFDLMAAIDRVTMAKAQEEVRKINPSAVIYGEGWLAGSTPLDSSLRMEIGSFNQAGLHIGLFNDRIREAIRGNLDNESKGFMQGNYSFRLEDLKRGIQGGLGDFAADPDECINYVSAHDNLTLWDKLQKSVPNEPDYIKDKMGRLANAIVLTAQGVPFLHGGVEFNRTKYMNHNSYNAGDKINKYNWNLKVKWYNTFKYYQGLIALRKAHPAFRMTTAEDIQKYLTFIQTPKGTLGFRLTYPKDTWNDIIVVYNSTKKVQEVTLPEGNWVVVANGDEVGTTPIKNLTNFVAGKALVAPISMFVAYKSNEFPQGFTKVTGKDPVSLESSSTVTVPKVYGNGNIEVTFKVKVPHGTDDDVIYLAGSFGKAGLSDWNPGDKDGAIELVRLQDGTYTVTVKLNAGETFEYKYTRGSWTTVEKGANKEEIENRKLTVKDEGGGKMIVSDTVLNWADK

SEQ ID NO: 100 - protein, 611 aa, Anaerocellum thermophilum
MRKPHIIEAIIGNTKVLGQLDSNGILQRFYWPAVDYYQQLKLFLAAVFLDGLVFFEDENFKIKSGFVDDFVYFFEYKIADKTIFQLDFVDFETDSLVRLWETGFEDFYVFLEPMINSSSLFNAAKVDKENEIVYAYFKGTYIGLAFENKIKSFTVKNGIDDANDNQLEGWNEATNPQIAVKLKNTGKVVCFLAFGNSKDEIYQKLSYLKQKGYDEVYRQNKAFWEKKFSKVKLICTQDPKDMQLQKRSAYVFYVLQNSKTGGILAASEVDEKFFHCGGYGFVWGRDAAFIVSAMDELGLSREVEKFFGFKFSCQEKEGFWDQRYYTDGSLAPSWGIQIDETASVVWGFLEHCEKQNSLHLIDLHKEQLKKALLFLIAAVDSEKGVIFRSFDLWEEREGIHLYSNASIYAALKKAKKYFPELESEIEKKLKAIKNQMATRFYSPKLSRYVRSTDVRIPHEEFLKLPEENRYMQKDERYEITYYFKKQDEVVDISMLGIYYPFEMVDSSDKAFKATILAIERECQNSIVGGYKRYSDDRYIGGNPWILTTLWLAIYYKKTGQIDRAEKLFEWAKAHSLPNGLFPEQVDRITGKPAWVVPLAWSHAMYVLYLYE

SEQ ID NO: 101 - protein, 529 aa, Streptomyces avermitilis
MTSFRPAPAWLADAVFYQIYPQSFADSDGDGIGDFNGIVQRLDHLVWLGVTAVWLNPCFVSPFRDAGYDVSDYLNVAPRYGSADDLAELVDEAGRRGIRVLLDLVAGHTSDEHPWFTASANDPDDHRYIWAPEGRPDGFVTSPGTRPGAYLPNFFDTQPALNFGYGRKNPAEPWRQPVDAAGPRANREALRTIMDHWLGLGLAGFRVDMAASLVKDDPGRTETARIWTELRHWLDTAHPDAVLLSEWGEPEVSVPAGFHTDFFLQFGGATDGLPLRSLWSNGDGTVNEAWDPLDCFFDASGKGSPRPFVEAWRKASDAVGATGFVSLPTANHDFSRLNCGPRTAEQLPAAFAFQLTWPTLPAIYYGDEIGMRYVGGLPDKEGSVLGPRYNRAGSRTPMQWDDGPGAGFSTAPADRLYLPLDPSPDRPTVAAQRADDGSLLHLVRRLVALRASTPALGSGGSVEVLHTGYPFVYVRGGRYLVVVNPQRNEVRCPYDATREARALEASGVRVGNGTIEAEGFSYGVFDLGR

SEQ ID NO: 102 - protein, 431 aa, Streptomyces avermitilis; identical to SEQ ID NO: 88

SEQ ID NO: 103 - protein, 503 aa, Saccharomycopsis fibuligera
LPLQEGPLNKRAYPSFEAYSNYKVDRTDLETFLDKQKDVSLYYLLQNIAYPEGQFNDGVPGTVIASPSTSNPDYYYQWTRDSAITFLTVLSELEDNNFNTTLAKAVEYYINTSYNLQRTSNPSGSFDDENHKGLGEPKFNTDGSAYTGAWGRPQNDGPALRAYAISRYLNDVNSLNKGKLVLTDSGDINFSSTEDIYKNIIKPDLEYVIGYWDSTGFDLWEENQGRHFFTSLVQQKALAYAVDIAKSFDDGDFANTLSSTASTLESYLSGSDGGFVNTDVNHIVENPDLLQQNSRQGLDSATYIGPLLTHDIGESSSTPFDVDNEYVLQSYYLLLEDNKDRYSVNSAYSAGAAIGRYPEDVYNGDGSSEGNPWFLATAYAAQVPYKLVYDAKSASNDITINKINYDFFNKYIVDLSTINSGYQSSDSVTIKSGSDEFNTVADNLVTFGDSFLQVILDHINDDGSLNEQLNRNTGYSTSAYSLTWSSGALLEAIRLRNKVKALA

SEQ ID NO: 104 - protein, 497 aa, Saccharomycopsis fibuligera
VPVELDKRNTGHFQAYSGYTVARSNFTQWIHEQPAVSWYYLLQNIDYPEGQFKSAKPGVVVASPSTSEPDYFYQWTRDTAITFLSLIAEVEDHSFSNTTLAKVVEYYISNTYTLQRVSNPSGNFDSPNHDGLGEPKFNVDDTAYTASWGRPQNDGPALRAYAISRYLNAVAKHNNGKLLLAGQNGIPYSSASDIYWKIIKPDLQHVSTHWSTSGFDLWEENQGTHFFTALVQLKALSYGIPLSKTYNDPGFTSWLEKQKDALNSYINSSGFVNSGKKHIVESPQLSSRGGLDSATYIAALITHDIGDDDTYTPFNVDNSYVLNSLYYLLVDNKNRYKINGNYKAGAAVGRYPEDVYNGVGTSEGNPWQLATAYAGQTFYTLAYNSLKNKKNLVIEKLNYDLYNSFIADLSKIDSSYASKDSLTLTYGSDNYKNVIKSLLQFGDSFLKVLLDHIDDNGQLTEEINRYTGFQAGAVSLTWSSGSLLSANRARNKLIELL

SEQ ID NO: 105 - protein, 747 aa, Saccharomyces cerevisiae
FPTALVPRGSSSSNITSSGPSSTPFSSATESFSTGTTVTPSSSKYPGSKTETSVSSTTETTIVPTTTTTSVITPSTTTITTTVCSTGTNSAGETTSGCSPKTITTTVPCSTSPSETASESTTTSPTTPVTTVVSTTVVTTEYASTSTKQGGEITTTFVTKNIPTTYLTTIAPTSSVTTVTNFTPTTITTTVCSTGTNSAGETTSGCSPKTVTTTVPCSTGTGEYTTEATAPVTTAVTTTVVTTESSTGTNSAGKTTTSYTTKSVPTTYVFDFGKGILDQSCGGVFSNNGSSQVQLRDVVLMNGTVVYDSNGAWDSSPLEEWLQRQKKVSIERIFENIGPSAVYPSILPGVVIASPSQTHPDYFYQWIRDSALTINSIVSHSADPAIETLLQYLNVSFHLQRTNNTLGAGIGYTNDTVALGDPKWNVDNTAFTEPWGRPQNDGPALRSIAILKIIDYIKQSGTDLGAKYPFQSTADIFDDIVRWDLRFIIDHWNSSGFDLWEEVNGMHFFTLLVQLSAVDRSLSYFNASERSSPFVEELRQTRRDISKFLVDPANGFINGKYNYIVETPMIADTLRSGLDISTLLAANTVHDAPSASHLPFDIDDPAVLNTLHHLMLHMRSIYPINDSSKNATGIALGRYPEDVYDGYGVGEGNPWVLATCAASTTLYQLIYRHISEQHDLVVPMNNDCSNAFWSELVFSNLTTLGNDEGYLILEFNTPAFNQTIQKIFQLADSFLVKLKATWEQTGN

SEQ ID NO: 106 - protein, 621 aa, Aspergillus niger
NVISKRATWDSWLSNEATVARTAILNNIGADGAWVSGADSGIVVASPSTDNPDYFYTWTRDSGLVLKTLVDLFRNGDTSLLSTIENYISAQAIVQGISNPSGDLSSGAGLGEPKFNVDETAYTGSWGRPQRDGPALRATAMIGFGQWLLDNGYTSTATDIVWPLVRNDLSYVAQYWNQTGYDLWEVNGSSFFTIAVQHRALVEGSAFATAVGSSCSWCDSQAPEILCYLQSFWTGSFILANFDSSRSAKDANTLLLGSIHTFDPEAACDDSTFQPCSPRALANHKEVVDSFRSIYTLNDGLSDSEAVAVGRYPEDTYYNGNPWFLCTLAAAEQLYDALYQWDKQGSLEVTDVSLDFFKALYSDATGTYSSSSSTYSSIVDAVKTFADGFVSIVETHAASNGSMSEQYDKSDGEQLSARDLTWSYAALLTANNRRNVVPSASWGETSASSVPGTCAATSAIGTYSSVTVTSWPSIVATGGTTTTATPTGSGSVTSTSKTTATASKTSTSTSSTSCTTPTAVAVTFDLTATTTYGENIYLVGSISQLGDWETSDGIALSADKYTSSDPLWYVTVTLPAGESFEYKFIRIESDDSVEWESDPNREYTVPQACGTSTATVTDTWR

SEQ ID NO: 107 - protein, 593 aa, Aspergillus oryzae
VQPVLRQATGLDTWLSTEANFSRQAILNNIGADGQSAQGASPGVVIASPSKSDPDYFYTWTRDSGLVMKTLVDLFRGGDADLLPIIEEFISSQARIQGISNPSGALSSGGLGEPKFNVDETAFTGAWGRPQRDGPALRATAMISFGEWLVENSHTSIATDLVWPVVRNDLSYVAQYWSQSGFDLWEEVQGTSFFTVAVSHRALVEGSSFAKTVGSSCPYCDSQAPQVRCYLQSFWTGSYIQANFGGGRSGKDINTVLGSIHTFDPQATCDDATFQPCSARALANHKVVTDSFRSIYAINSGRAENQAVAVGRYPEDSYYNGNPWFLTTLAAAEQLYDALYQWDKIGSLAITDVSLPFFKALYSSAATGTYASSTTVYKDIVSAVKAYADGYVQIVQTYAASTGSMAEQYTKTDGSQTSARDLTWSYAALLTANNRRNAVVPAPWGETAATSIPSACSTTSASGTYSSVVITSWPTISGYPGAPDSPCQVPTTVSVTFAVKATTVYGESIKIVGSISQLGSWNPSSATALNADSYTTDNPLWTGTINLPAGQSFEYKFIRVQNGAVTWESDPNRKYTVPSTCGVKSAVQSDVWR

SEQ ID NO: 108 - protein, 579 aa, Rhizopus oryzae
ASIPSSASVQLDSYNYDGSTFSGKIYVKNIAYSKKVTVIYADGSDNWNNNGNTIAASYSAPISGSNYEYWTFSASINGIKEFYIKYEVSGKTYYDNNNSANYQVSTSKPTTTTATATTTTAPSTSTTTPPSRSEPATFPTGNSTISSWIKKQEGISRFAMLRNINPPGSATGFIAASLSTAGPDYYYAWTRDAALTSNVIVYEYNTTLSGNKTILNVLKDYVTFSVKTQSTSTVCNCLGEPKFNPDASGYTGAWGRPQNDGPAERATTFILFADSYLTQTKDASYVTGTLKPAIFKDLDYVVNVWSNGCFDLWEEVNGVHFYTLMVMRKGLLLGADFAKRNGDSTRASTYSSTASTIANKISSFWVSSNNWIQVSQSVTGGVSKKGLDVSTLLAANLGSVDDGFFTPGSEKILATAVAVEDSFASLYPINKNLPSYLGNSIGRYPEDTYNGNGNSQGNSWFLAVTGYAELYYRAIKEWIGNGGVTVSSISLPFFKKFDSSATSGKKYTVGTSDFNNLAQNIALAADRFLSTVQLHAHNNGSLAEEFDRTTGLSTGARDLTWSHASLITASYAKAGAPAA

SEQ ID NO: 109 - protein, 644 aa, Clostridium thermocellum
MANTYFNDAIIGNSGMLVCLTRNGELTRLFWPNIDYPQHFEKMATGIFYTGQKNSTSWFYEDNWHHTQYYVEDTNILKTICEDGGRGLRVEQTDFVLKDRDVMVRRYVIENIGPNEVDLGFVQYSSTVSTTPELRSTLFDFNVDALIHYRHNYYISISSDSEVVQFQLGNNAFDCARYTELYGYDSIGMMKDGAMSFNIGKIEPGGKKTFNLFICASHTLKGVKELVRWCRKMNVDEEYEKTRKYWLDFLKNARLIVTGDKNIDNLYKRSILVFKLMSDERTGGLLASAEIDEGFTRCGRYAYCWGRDAAFITGALDTAGLTEAVDKFYQWAVMTQDDDGSWQQRYHMDGNLAPSWGLQIDETGTLIWGMLKHYEVTKNIDFLKSMWESIKKGVEFLTRFIDSDTGLPAPSYDLWEERVGEHTYSSAAVYAGIKAGAEAARILGASEELIEKWEKAASDMKASIEKNFWRDEAGRFIRSVRTKLNPWGSEHSPYTTVIKVNEKGYFRDVTLEDWTIDVSLLGVSIPFGVFDVHDERVKKTVEAIERALTSHPVGGIKRYENDNYIGGNPWVLATLWVALYYIEIKEYEKAKDYLRWATKSCTALGLLPEQVSKDNGEPCWVIPLTWSHAMYVLVLAGLKEAGVL

SEQ ID NO: 110 - protein, 644 aa, Clostridium thermocellum
MQKSYYNNAITGNSSMLACFSERAELLRLFWPDIDYIQNLDKMFLGLFEKNKTGSTVWLNDIRCEHHQEYLPDSNIIKNMVTNFFDGYKVVLYDFVHPEMDVLVRRFEIENLRGESRELGLMSFSAATSSDSEVACSLFDFMNEALVHYKPDSYIAVTSDIPVYQFQIGNNANDAAVNTYLYGKDDIGMMKDAAISWDLGVFQPHAVKTTNVYLCAADTLKSCKALVRRVKTVGGLTAFRETGRYWKDYLEKTTKLKSGNTLLDDLYKRSLLVFRLMYSKKSGGLMAAPEVDEYFTKCGKYAYCWGRDAAFITGALDIGGLCESVDHFYKWAVNVQDEDGSWQQRYHMNGNLGPCWGLQVDETGTIIWGMLNHYNYTKNTDFLKSVWDSVKAAADFLVRFIDSETGLPRPSFDLWEERYGEHAYSSASVCAGLKSASEMARILGKPSQEYIQWETTADSIKKAIVKYFWKEDYRRFIRSIRVKLNGFGQEPSSDTMLIKVNPKGYVRDVTKEDWIVDVSLVGLGIPFEIFELNDPMLRDTVSLIEQVLTAQGVGGIKRYENDTYIGGNPWILTTLWIALYHAKSGNYKKAKEYLIWAASGKTELGLLPEQINRDTGKPEWIIPLTWSHAMYVHVYSELINAGVL

SEQ ID NO: 111 - protein, 608 aa, Arxula adeninivorans
DSCHTFTLANSPPDDKAVALSSYSYCGGYLSASAFVKNLSYDKLVTLYWTNADNKSTPLNAGSLDYVKAASDDQSWELWSLNVTTVPDGVDALLNITYVAASIGKTNSQQLNVQVEATGDPIPTPQIPTIYKPYASPSDFSDDITNWLKPSNDSQTGIAKSFLFNNINIPGAAPGTVIAAQSYSEPDYAYTWVRDASLVMDVVNRLYSSAKSEEKRQLYEKILFQYAKAGAQEQNDPTAISGMGEPKFYLNNTAFTGSWGRPQNDGPATRAITLIEFANAYLANGGSQDTVREQLYDSDKYPQVAPIKKDLQFVASNWSSPSFDLWEEEESAHFYTRLVQRKALLLGADFANDMGDHELSDKLKTQASKLSDTLPEFWDSARQLILYEYGPVLRGKYSYKDISVVLGVMHGYANDNVFSYTNDQILATAYQVSTSFLDVYKVANTTSDESGKPLGIPVGRYPEDVYDGVGTSQGNPWYLTTMAMAEFLYRSVQEFEDAGSIIISDTSLPFWKYFASSVDHKAGAKYNKNDQSFKTSLKSLTGWGDAFMRRAKYHTPSSGHMSEEFNRTTGEPRGAKDLTWSYASLLSAAFAREELRNQKNYLTNVADL

SEQ ID NO: 112 - protein, 595 aa, Hormoconis resinae
APTELKARDLSSFIASERAIALQGALNNIGPDGSAVPGAGAGFVVASPSKANPDYFYTWSRDSALTLKMIIDEFILGNTTLQTIIEQYIHAQAVLQTVSNPSGTFLPDGVGLGEPKFMVDGTRFNGPWGRPQRDGPALRAIALMTYSNWLIKNGQFAEAKTKIWPIIANDLSYVGQYWNQSGFDLWEETYASSFFTIQNQHRALVEGAQLAHDLGVTCTGCDQAPEVLCFLQSFWNGKYIVSNINVNNGRTGLDGNSILGAISTFDIDAYCDSPTLQPCHSQSLANFKVLTDTFRNLYTINAGIPEGQGVAVGRYAEDVYMGGNPWYLITTAAAEFLYDAVAQWKARHVLTVDETSLAFFKDIYPEVTVREYKSGNANSPFAQIMDAVTAYADSYVAIAEKYIPSNGSLSEQFNRDTGTPLSAIDLTWSYAAFITMSQRRAGQYPSSWGSRNALPPPTTCSASSTPGIYTPATAAGAPNVTSSCQVSITFNINATTYYGENLYVIGNSSDLGAWNIADAYPLSASAYTQDRPLWSAAIPLNAGEVISYQYVRQEDCDQPYIYETVNRTLTVPACGGAAVTTDDAWMGPVGSSGNC

SEQ ID NO: 113 - protein, 601 aa, Aureobasidium pullulans
LPSPESIQERATGSLSSWLSSENTVALQGVLNNIGASGSKASGASAGVVVASPSKSNPDYFYTWTRDSALVFKALVDQLIAGNKSLEPLIQQYISAQAKLQTVNNPSGGLCSGGLAEPKFEVDLTPFTGAWGRPQRDGPALRATAMIAYSRYLIANGNTTTVNNIIWPIVQNDLSYVTQYWNQTTFDLWEEINSSSFFTTAVQYRALVEGNNLATQLGKSCPNCVSQAPLVLCFLQSYWTGSYALSNTGGGRSGKDANSILTSIHIFDPAASCDSTTFQPCSDKALANHKVVTDSFRSIYSINQGIAQGSGVAVGRYPEDSYYNGNPWYLNTFAAAEQLYDAVYQWKKIGSISITSISLPFFKDVYSSAAVGTYSSSTVTFTSIVNAVQTYADSYMSIAQKYTPSNGALSEQYNRADGTPLSAVDLTWSYAAFLTAYNARANVLPASWGASSAKLPNSCSSGSATGPCAAATNTNWGNPGSPSTGTPTTTTGGSCTTPTSIAVTFNEQKTTSYGENIYIVGSIPALGNWNTANAVALSASKYTSSNPLWTVTINFATGTSFNYKYIKKAQDGSVTWESDPNRSYTVTGNCAGTATENDSWR

SEQ ID NO: 114 - protein, 718 aa, Bacillus subtilis
MVSIRRSFEAYVDDMNIITVLIPAEQKEIMTPPFRLETEITDFPLAVREEYSLEAKYKYVCVSDHPVTFGKIHCVRASSGHKTDLQIGAVIRTAAFDDEFYYDGELGAVYTADHTVFKVWAPAATSAAVKLSHPNKSGRTFQMTRLEKGVYAVTVTGDLHGYEYLFCICNNSEWMETVDQYAKAVTVNGEKGVVLRPDQMKWTAPLKPFSHPVDAVIYETHLRDFSIHENSGMINKGKYLALTETDTQTANGSSSGLAYVKELGVTHVELLPVNDFAGVDEEKPLDAYNWGYNPLHFFAPEGSYASNPHDPQTRKTELKQMINTLHQHGLRVILDVVFNHVYKRENSPFEKTVPGYFFRHDECGMPSNGTGVGNDIASERRMARKFIADCVVYWLEEYNVDGFRFDLLGILDIDTVLYMKEKATKAKPGILLFGEGWDLATPLPHEQKAALANAPRMPGIGFFNDMFRDAVKGNTFHLKATGFALGNGESAQAVMHGIAGSSGWKALAPIVPEPSQSINYVESHDNHTFWDKMSFALPQENDSRKRSRQRLAAAIILLAQGVPFIHSGQEFFRTKQGVENSYQSSDSINQLDWDRRETFKEDVHYIRRLISLRKAHPAFRLRSAADIQRHLECLTLKEHLIAYRLYDLDEVDEWKDIIVIHHASPDSVEWRLPNDIPYRLLCDPSGFQEDPTEIKKTVAVNGIGTVILYLASDLKSFA

SEQ ID NO: 115 - protein, 710 aa, Bacillus licheniformis
MPGISRPFEAYLDEMRTITVLVPKSRASSCSPPFLLEDDQGERIELSVKAQVELEEQFKYVLESSCTVPFGRVHKVCCEESVWTDLQIGSVTRSAAFDKAFFYDGRLGAFYSKGSTLFKVWAPTASAAAIKLEDPDSLQTNTFQMMRRKKGVFEVTVEGDLNGWSYLYELYVNGKPLLTVDPYAKAVTANGEKGVVLDPEEVKVEKHRAPRLHSPCDAVIYEVHIRDFSIHEDSGMRHKGKYVAFTEDGTETSGGFSTGIAYLKELGVTHIEVLPFHDFAGVDELSPDQSYNWGYNPLHFNAPEGSYSLDPQNPKCRITELKTMIQSLHKHGFSVIMDAVYNHVYKRETSPFEKTVPGYFFRHNEYGFPSDGTGVGNDIASERLMVRKYILDSVRYWLEEYDVDGIRFDLMGILDIETVRQISTLAENVKPGVPLFGEGWDLNTPLDSGQKATLQNAGKVPAVGFFNDRFRNAVKGSTFELSDRGYALGDTGKKAALQHGIAGSPGFLQPAQSINYVECHDNHTFWDKMALCFEEDADTKRLRQRLAVSIVLLSQGVPFLHAGQEFCRTKNGDSNSYRSGDDINKLDWEKRAELCEDVEYVRQLIRLRRSHPAFRLQKEEEVKEHLSFMDGTGEVTAYKLKNIAAIDPWNEIIVVHCPFAKKETLKLPDQKQYLLHCDPFTFFNGKVQAEKRLRLNGIGTYVLYEPKGIF

SEQ ID NO: 116 - protein, 918 aa, Oryza sativa
MAVGEECAAAVASQGFVSDARAYWVTRSLIAWNVNDQDTSLFLYASRDATMHVSDGAIHGYDSKIELEPEHASLPDNVAEKFPFIRSYRTFRVPSSVDVTSLVKCQLAVASYDAHGRHQDVTGLQLPGVLDDMFAYTGPLGAVFSDKDVDLYLWAPTAQDVRVCFYDGPAGPLLQTVQLKELNGVWSVTVPRYRENQYYLYEVKVYHPSTSQVEKCLADDPYARGLSANGTRTWLVDINSETLKPASWDELSDEKPNLESFSDISIYELHIRDFSAHDSTVDCNSRGGFRAFTFQDSAGIRHLRKLSAAGLTHVHLLPSFHFASVDDNKSNWKFVDEAQLAKLPPGSDEQQAAIVSIQQEDPYNWGYDPVLWGVPKGSYASNPDGPSRIIEYRQMVQALNRIGLRVVMDVVYNHLDSSGPFGVSSVLDKIVPGYYLRRNVNGQIENSAAMNNTASEHFMVDRLIVDDLLNWAINYKVDGFRFDLMGHIMKSTMFTVMSICTISTIIKIKDVFADTLIRAKSAIRSLTRDVHGVDGSKIYLYGEGWDFGEVAQNKRGINASQINMSGTGIGSFNDRIRDSVNGGNPFGNPLQQGFSTGLFLEPNGYYQGNEADTRRELATYADHIQIGLAGNLKDYVLRTHTGEAKKGSDIYTFDGSPVGYTSSPVETINYVSAHDNETLFDIVSIKTPIGLSIDEKCRINHLASSMIALSQGIPFFHAGDEILRSKSLDRDSYNSGDWFNKLDFTYETNNWGVGLPPRDKNEENWHLIKPRLENPSFRPLKNHILSVFDNFVDILKIRYSSPLFRLSTASDIEQRVRFHNTGPSMVPGVIVMSIKDAQNEKCKMAQLDKNFSYVVTIFNVCPHEVSIEIHDLASLGLELHPIQVNSSDALVRQSAYEASKGRFTVPRRTTAVFVQPRC

SEQ ID NO: 117 - protein, 963 aa, Triticum aestivum
MPMPMRTMLLRHLSPAPALPNPRRSSASSPQRRPARARPPPLHSARATALRARRTPMAAGETGASVSVSAAEAEAEATQAFMPDARAYWVTSDLIAWNVSEQEAASVYLYASRTAAMGLSPSNGGIQGYDSKVELQPESAGLPETVTQKFPFISSYRAFRVPSSVDVASLVKCQLVIASFGADGKHVDVTGLQLPGVLDDIFAYTGPLGAVFREDSVSLHLWAPTAQDVSVCFFDGPAGPVLETVQLKESNGVWSVTGPREWENRYYLYEVDVYHPTKAQVLKCLAGDPYARGLSANGARTWLVDINNETLKPASWDELADEKPKLDSFSDITIYELHIRDFSAHDGTVDSDSCGGFRAFAYQASAGMQHLRKLSDAGLTHVHLLPSFHFAGVDDIKSNWKFVDECKLATFPPGSDMQQEAVVAIQEEDPYNWGYNPVLWGVPKGSYASDPDGPSRIIEYRQMVQALNRIGLRVVMDVVYNHLDSSGPCGISSVLDKIVPGYYVRRDTNGQIENSAAMNNTASEHFMVDRLIVDDLLNWAVNYKIDGFRFDLMGHIMKHTMMRAKAALQSLTRDAHGVDGSKIYLYGEGWDFAEVARNQRGINGSQLNMSGTGIGSFNDRIRDAVNGGNPFGNPLQQGFNTGLFLEPNGFYQGNEADTRRSLATYADQIQIGLAGNLRDYVLITHTGETKKGSEIHTFDGLPVGYTSSPIEIINYVSAHDNETLFDVISVKTPMNLSVDERCRINHLASSMMALSQGIPFFHAGDEILRSKSIDRDSYNSGDWFNKLDFTYETNNWGVGLPPSEKNEDNWPLMKPRLENPSFKPAKGHILAALDSFVDILKIRYSSPLFRLSTASDIKQRVHFHNTGPSSVPGVIVMGIEDARDEKPEMAQLDANFSYVVTVFNVCPHEVSMDIPALASMRLELHPVQVNSSDALVGKSVYEAATGRFTVPRRTVSVFVEPRC

SEQ ID NO: 118 - protein, 647 aa, Clostridium phytofermentans
MDEFWNSIDGEKQYYYDGNDLGCTYTNRSTKLKVWAPTASMVVVNLYQNGNAGKPYITEIMKKEESGIWSVCLLGDLEGVYYTYLVTVDGQTKEAVDPYARTTGLNGKRAMILDLEKTNPTGFLEDTKPKFDSFLDAVIYELHIRDLSMESDSGIKEKGKLLGLTELNTRNSDGLTTGLSHILDLGVTHIHLLPCFDYASVDEENSSIFNWGYDPENYNVVEGSYSTNPYDGAVRVKEFKTLVQSLHENGLRVIMDVVYNHTMKTEESNFNKIVPDYYYRKVGDKFSDASACGNETASERLMVRKFIVDSIIYWAKEYHIDGFRFDLMGIHDIETMNEVRKVLDQIDPSIILYGEGWVGGDSPLPAGQRAMKANMSMLPGIAAFSDDFRDGLKGSVFLAEEKGFATGDSDKKESVKFGVVASTLHPQIDYKKVNYSDSPWALEPAQCINYVSAHDNYTLWDKIACSCKEDTYEIRVKKNKLCAAIVFTSQGIPFLQAGEEMLRNKPSSEIAGEFVENSYNSSDSVNCIKWSNKANVIDVVSYYEGLIRFRKEHKALRMQSAKEISKRLTFLPEEREDVISYLIQGDLVDKTLCVIYNSSEEKVTIRLPESDWTVYIDGNNSGVEPLYEVKGTTVEVEPISCMVLVKD

SEQ ID NO: 119 - protein, 1764 aa, Streptomyces avermitilis
ATPPAPPSDAKLAAEPARHDATREQFYFVMPDRFANGDTSNDKGGLTGSRLSTGYDPTDKGFYQGGDLKGLTRKLDYIKGLGTTSIWLAPIFKNQPVQGTGKDASAGYHGYWITDFTKVDPHFGTNKDLETLISKAHAKGMKVFFDVITNHTADVVDYEEKSYGYLSKGAFPYLTKDGRPFDDAGYTDGPRKFPAVDGDSFPRTPAVAARKKNAKVPSWLNDPTMYHNRGDSTFAGESSTHGDFSGLDDLWTERPEVVRGMEKIYEKWVRDFGIDGFRIDTVKHVNTEFWTQWATALDAYAKKRGKDDFFMFGEVYSADTSVTSPYVTQGRLDSTLDFPFQDAARSYASQGGSAKKLASVFGDDYKYTTDKANAYEQVTFLGNHDMGRIGYFLNQDNPKATDAELLRKDRLANELMFLSRGNPVVYYGDEQGFTGSGGDKDARQTMFASKVADYLDDDEIGTDRGHASDAYDTSAPLYKEIAALSKLRKDNPALADGIQTERYAADGAGVYAFSRTDARTGTEYVVAVNNADKASAATFATGSADTAFKGIHGTDDVLKSDADKKITVTVPAGAAVVLKAAGRPGTPAAKPSLTLKAPDAGATGTVELSADVDGGRLNRVVFAAQVGNAKWRTLGSADHAPYRVTQTIGKDVPAGTALRYKAVVIDAAGRTASATAASTTGTPPAAETPTASSRDYAIVHYKRPDGDYTDWRLYAWGDLADGESTTWPAGHDFVGRDAYGAFAYVKLKPGASTVNFLVIDKDGDKDVSADRTIDVTKAGEVWVEQGKETVRTERPDYPAQDKTKAVIHYHRADGDLTGWGLHVWTGAATPTDWSKPLEPVRTDAYGAVFEVPLTDGATSLSYIIHKGDEKDLSADRSLDLTADGHEVWLLNGQENHLLPQPAGSAAALDLTTSKAVWIDRNTVAWNGSDAAASTQLLSSRDGSIAVKDGSLTSDDERWLRLSKTSLTDAQKAAFPHLKSYTAWSVDPRDRDRVREALAGQVVASQRAANGAVLAATGVQLAGVLDDLYDATKADLGPTFRGGHPTLAVWAPTAQSVSLELDGAHVRMKRNNATGVWSVTGPASWKGKPYRYVVKVWAPTVRKVVTNKVTDPYSVALTTDSERSLVVDLDDRSLAPSGWSSLKKPKAVPLRDAEIQELHIRDFSVADRTVPAKDRGTYLAFTDKNSDGSRHLRQLAESGTSYVHLLPAFDIATIAEKKSGQQATDCDLASYAADSEKQQECLTAVAAKDAYNWGYDPYHYTVPEGSYATDANGTRRTVEFRRMVKSLNQDGLRVVMDVVYNHTAAAGQAGTSVLDRIVPGYYQRLLADGSVATSTCCANTATENAMMGKLVVDSLVTWAKEYKVDGFRFDLMGHQPKANILAVRKALDALTVAKDGVDGKKIILYGEGWNFGEVADDARFVQATQKNMAGTGIATFSDRARDAVRGGGPFDADPGVQGFGSGLYTDPNSSDANGTPAEQKARLLHYQDLIKVGLSGNLAKYRFTDSSGKEVTGSEVDYNGTGAGYADAPGDALAYADAHDNESLYDALTYKLPKGTPAGDRARMQVLAMATAALAQGPSLSQAGSDLLRSKSLDRNSYDSGDWFNAIHWNCQDGNGFGRGLPMAADNKSKWPYATPLLTSVKVGCDQIEGTSAGYQDLLRIRTTEPDFSLSTAGQVQSKLTFPLSGKDETPGVITMKLGDLVVVFNATPDQQEQTVAALAGKDYALHPVQAAGADPIVKSASYTAKSGMFAVPGRTVAIFSQVAR

SEQ ID NO: 120 - protein, 1079 aa, Klebsiella pneumoniae
SSSSPSGSPGSPGNPGNPGTPGTPDPQDVVVRLPDVAVPGEAAQASANQAVIHLVDIAGITSSTPADYATKNLYLWNNETCDALSAPVADWNDVSTTPTGSDKYGPYWVIPLTKESGCINVIVRDGTNKLIDSDLRVSFGDFTDRTVSVIAGNSAVYDSRADAFRAAFGVALADAHWVDKTTLLWPGGENKPIVRLYYSHSSKVAADSNGEFTDKYVKLTPTTVSQQVSMRFPHLASYPAFKLPDDVNVDELLQGETVAISAESDGILSSATQVQTAGVLDDTYAAAAEALSYGAQLTDSGVTFRVWAPTAQQVELVVYSADKKVVASHPMTRDSASGAWSWQGGSDLKGAFYRYAMTVYHPQSRKVEQYEVTDPYAHSLSTNSEYSQVVDLNDSALKPEGWDGLTMPHAQKTKADLAKMTIHESHIRDLSAWDQTVPAELRGKYLALTAQESNMVQHLKQLSASGVTHIELLPVFDLATVNEFSDKVADIQQPFSRLCEINSAVKSSEFAGYCDSGSTVEEVLTQLKQNDSKDNPQVQALNTLVAQTDSYNWGYDPFHYTVPEGSYATDPEGTARIKEFRTMIQAIKQDLGMNVIMDVVYNHTNAAGPTDRTSVLDKIVPWYYQRLNETTGSVESATCCSDSAPEHRMFAKLIADSLAVWTTDYKIDGFRFDLMGYHPKAQILSAWERIKALNPDIYFFGEGWDSNQSDRFEIASQINLKGTGIGTFSDRLRDAVRGGGPFDSGDALRQNQGVGSGAGVLPNELTSMTDDQARHLADLTRLGMAGNLADFVLIDKDGAVKKGSEIDYNGAPGGYAADPTEVVNYVSKHDNQTLWDMISYKAAQEADLDTRVRMQAVSLATVMLGQGIAFDQQGSELLRSKSFTRDSYDSGDWFNRVDYSLQDNNYNVGMPRSSDDGSNYDIIARVKDAVATPGETELKQMTAFYQELTALRKSSPLFTLGDGATVMQRVDFRNTGADQQTGLLVMTIDDGMQAGASLDSRVDGIVVAINAAPESRTLQDFAGTSLQLSAIQQAAGDRSLASGVQVAADGSVTLPAWSVAVLELPQGESQGAGLPVSSK

SEQ ID NO: 121 - protein, 546 aa, Rhizomucor pusillus
ATSDDWKGKAIYQLLTDRFGRADDSTSNCSNLSNYCGGTYEGITKHLDYISGMGFDAIWISPIPKNSDGGYHGYWATDFYQLNSNFGDESQLKALIQAAHERDMYVMLDVVANHAGPTSNGYSGYTFDDASLYHPKCTIDYNNQTSIEQCWVADELPDIDTENSDNVAILNDIVSGWVGNYSFDGIRIDTVKHIRKDFWTGYAEAAGVFATGEVFNGDPAYVGPYQKYLPSLINYPMYYALNDVFVSKSKGFSRISEMLGSNRNAFEDTSVLTTFVDNHDNPRFLNSQSDKALFKNALTYVLLGEGIPIVYYGSEQGFSGGADPANREVLWTTNYDTSSDLYQFIKTVNSVRMKSNKAVYMDIYVGDNAYAFKHGDALVVLNNYGSGSTNQVSFSVSGKFDSGASLMDIVSNITTTVSSDGTVTFNLKDGLPAIFTSAGATSPGGSSGSVEVTFDVYATTVYGQNIYITGDVSELGNWTPANGVALSSANYPTWSATIALPADTTIQYKYVNIDGSTVIWEDAISNREITTPASGTYTEKDTWDES

SEQ ID NO: 122 - protein, 481 aa, Bacillus licheniformis
VNGTLMQYFEWYTPNDGQHWKRLQNDAEHLSDIGITAVWIPPAYKGTSQADVGYGAYDLYDLGEFHQKGTVRTKYGTKGELQSAIKSLHSRDINVYGDVVINHKGGADATEDVTAVEVDPADRNRVISGEHLIKAWTHFHFPGRGSTYSDFKWYWYHFDGTDWDESRKLNRIYKFQGKTWDWEVSNEFGNYDYLMYADIDYDHPDVVAEIKRWGTWYANELQLDGFRLDAVKHIKFSFLRDWVNHVREKTGKEMFTVAEYWSNDLGALENYLNKTNFNHSVFDVPLHYQFHAASTQGGGYDMRKLLNGTVVSKHPLKSVTFVDNHDTQPGQSLESTVQTWFKPLAYAFILTRESGYPQVFYGDMYGTKGDSQREIPALKHKIEPILKARKQYAYGAQHDYFDHHDIVGWTREGDSSVANSGLAALITDGPGGAKRMYVGRQNAGETWHDITGNRSEPVVINSEGWGEFHVNGGSVSIYVQR

SEQ ID NO: 123 - protein, 484 aa, Aspergillus niger
LSAAEWRTQSIYFLLTDRFGRTDNSTTATCDTGDQIYCGGSWQGIINHLDYIQGMGFTAIWISPITEQLPQDTADGEAYHGYWQQKIYDVNSNFGTADDLKSLSDALHARGMYLMVDVVPNHMGYAGNGNDVDYSVFDPFDSSSYFHPYCLITDWDNLTMVQDCWEGDTIVSLPDLNTTETAVRTIWYDWVADLVSNYSVDGLRIDSVLEVEPDFFPGYQEAAGVYCVGEVDNGNPALDCPYQKVLDGVLNYPIYWQLLYAFESSSGSISNLYNMIKSVASDCSDPTLLGNFIENHDNPRFASYTSDYSQAKNVLSYIFLSDGIPIVYAGEEQHYSGGKVPYNREATWLSGYDTSAELYTWIATTNAIRKLAISADSAYITYANDAFYTDSNTIAMRKGTSGSQVITVLSNKGSSGSSYTLTLSGSGYTSGTKLIEAYTCTSVTVDSSGDIPVPMASGLPRVLLPASVVDSSSLCGGSGRLYVE

SEQ ID NO: 124 - protein, 586 aa, Aspergillus tamarii
ATPADWRSQSIYFLLTDRFARTDGSTTAACNTEDRKYCGGTWQGIIDKLDYIQGMGFTAIWITPVTGQLPQHTAYGDAYHGYWQQDIYSLNENYGTADDLKALSSALHERGMYLMVDVVANHMGYDGAGASVDYSVFKPFNSQEYFHSFCLIQNYEDQTQVENCWLGDNTVSLPDLDTTKDEVKNEWYDWVGTLVSNYSIDGLRVDTVKHVQKDFWPGYNKAAGVYCIGEVLDGDPAYTCPYQDVMDGVLNYPIYYPLLNAFKSTSGSMNDLYNMINTVKSDCPDSTLLGTFVENHDNPRFASYTNDIALAKNVAAFIILNDGIPIIYAGQEQHYAGGNDPANREATWLSGYATDSELYKLIASANAIRSHAISKDTGFVTYKNWPIYKDDTTIAMRKGTDGSQVVTILSNKGASGDSYTLSLGDTGYKAGQQLTEVIGCTTVTVGSDGKVPVPMAGGLPRVLYPTEKLADSKICSSSGATSPGGSSGSVEVTFDVYATTVYGQNIYITGDVSELGNWTPANGVALSSANYPTWSATIALPADTTIQYKYVNIDGSTVIWEDAISNREITTPASGTYTEKDTWDES

SEQ ID NO: 125 - protein, 603 aa, Acidomyces richmondensis
LTPAEWRAQSIYQVLTDRFALTNGSTTAPCNLNEYCGGTWQGIINKLDYIQGMGFTAIWISPVVENIPASDNTADGESYHGYWAQRIYEVNPNFGSAADLEALSEAIHARGMYLMVDIVTNHMGYDGCGTCVDYSVFDPFDNQSYFHPFCLINYNNATSIQVCWEGDNIVSLPDLRTEDSDVLGMWETWITQLVANYSIDGLRVDSMQQVDQAFWQPFMSAAGDLYAVGEVFNGDPTYTCPYQQYLPGVLNYPAYYWITQAFESTSGSIGNLVNGINEMKNDCLDTTLLGSFLENHDNPRFPSYTSDYSLDKNAIAFAMLQDGIPIVYEGQEQHYSGGSVPNNREDIWSSGYSTTSELYTFIKIINAIRTQALTKDSSYLTYKAYPVYSDSQTIAMRKGETYPIISVFTNSGASGSAYSITLSSSDTGFSENQSITELLTCTVSTTDSGGNLVVNISSGLPRVYYPTSAISGSTVCAESTSTLTISSPISTSTSDCTTASSVAVTFDETVTTTYGETIKLSGSISQLGDWNTQDAILLSAADYKSTDNVWFVTINLPAGIVFQYKYINVDSDGDVTWEADPNHTYTVSATCATAATIHDTWQN

SEQ ID NO: 126 - protein, 588 aa, Aspergillus bombycis
ATPADWRSQSIYFLLTDRFARTDGSTTATCNTEDRKYCGGTWQGIIDKLDYIQGMGFTAIWITPVTGQLPQDTAYGEAYHGYWQQDIYALNENHGTADDLKALSSALHERGMYLMVDVVANHMGYDGAGASVDYSVFNPFSSQDYFHSFCLIENYDDQTQSENCWLGDNSVSLPDLDTTKDEVKNEWYEWVGNLVSNYSIDGLRVDTVKHVQKDFWPGYNEAAGVYCIGEVLNGDPAYTCPYQDVMDGVLNYPIYYPLLNAFKSTSGSMNDLYNMINTVKSDCPDSTLLGTFVENHDNPRFASYTNDIALAKNVAAFIILNDGIPIIYAGQEQHYAGGNDPANREATWLSGYSTDSEIYKLIASANAIRNHAVSTDTGFVTYKNWPIYKDDTTIAMRKGTDGSQIVTILSNKGASGDAYTLSLGNTGYTAGQQLTEVIGCTTLTVGSDGNVPVPMAGGLPRVLYPTEKLGDSKICSSSGRGATSPGGSSGSVEVTFDVYATTVYGQNIYITGDVSELGNWTPANGVALSSANYPTWSATIALPADTTIQYKYVNIDGSTVIWEDAISNREITTPASGTYTEKDTWDES

SEQ ID NO: 127 - protein, 570 aa, Alternaria sp.
ADTSAWKSRSIYFVLTDRIARSSSDTGGGSCSNLGNYCGGTFKGLESKLDYIKNLGFDAIWITPVVANSAGGYHGYWAQDLYAVNSNYGTAADLKSLVNTAHSKGIYVMVDVVANHMGQGAISGNRPEPLNQDSSYHSACDINYSSQTSIEQCRIANLPDLNTQSSQIRSLLNTWISWLVNEYSFDGVRIDTVKHVEKDFWPGFASAAGVYSIGEVWDGNPTYLAEYARLMPGLLNYATYYPMNNFYQQKGSSQALVDMMNTVRDTFPDPSALGTFLDNHDNNRWLNQKNDVTLLKNALAFVILSRGIPIVYYGTEQGYAGGADPANREDLWRSSFNTNADLYQAIKKLNAARTSAGGLAGNDHTHLYVSSNAYAWSRANGNLVVLTTNAGSGSNAQHCFNTQKANGRWTNVYGNGATVTADGSGNICVNVANGEPVVLLVSTATPTSATPTSNPSPTTLLTTSTACPTSVSVSFTHRVTTVFGDTIKITGNTAQLGNWNPSNGVALSAASYTSSNPIWTLTLPLPAGSAIQYKFVKVSSGGTVTWESDPNRSYSVPGCQASASVSSQWQ

SEQ ID NO: 128 - protein, 551 aa, Rhizopus microsporus
SPITIRSQNSNDWSSRVIYQLLTDRFAKTVDDQSPCSDLGNYCGGSFQGIINHLDYIAGMGFDAIWISPIPQNAQGGYHGYWATNFSAINSNFGSSNDLKKLVQAAHAKNMYVMLDVVANHVGTPSTPNNYNGYTFNQGSYYHSYCDINYNDQTSVEQCWLSGLPDLNTENDYVVNTLYSTVSNWISEYGFDGIRIDTVKHVRKDFWDGYVKAAGVFATGEVLHGSVSYVAPYQSHVPSLINYPLYYPIYDVFTKAATMTRLKSGYNDIQSGGFSNLNLLLNFIDNHDNPRLLSKADQSLVKNALTYSMLIQGIPVVYYGTEQSYKGGNDPNNREPLWTSGYSSSSEMYQFIKQVIQIRKGSNATVTMDIDQADNVYVFQRGNYLAVVNNYGQGSTNSVTVKSGSFADGTVLKDVFSGATATVKNKSITFQLQNGNPAVFSPQGATSPGGSSGSVEVTFDVYATTVYGQNIYITGDVSELGNWTPANGVALSSANYPTWSATIALPADTTIQYKYVNIDGSTVIWEDAISNREITTPASGTYTEKDTWDES

SEQ ID NO: 129 - protein, 565 aa, Syncephalastrum racemosum
VPLSIIDKRAGVTTLSKRAAADDWKSRSIYQIVTDRFARSDGSTSGCGDLSNYCGGDYKGIQNQLDYIAGMGFDAIWISPIPENTDGGYHGYWAKNFEALNTNFGSADDLKALVTAAHGKGMYVMLDVVANHAGPTSGGDYSGFTFDSASNYHAQCDIDYENQTSIEQCWVADNLPDINTEDDTIVSKLHSIVSDWVTTYDFDGIRIDTVKHIRKDFWSGYEEAAGVFATGEVFDGDAAYVGPYQDQLSSLINYPLYYAIRDVFTAGSGFSRISDMLSSINSNFKDPSVLTTFVDNQDNARFLSVKSDTSLYKNALAFTILTEGIPVVYYGTEQGFKGGNDPNNREVLWTSNYDTSSDLYKFIKIVNDQVRQKSNKTVKLNVDVGTNTYAFTHGKNLIVVNNYGSGSTASVTVKVGDSIADGTKLVDAVSNITATVSGGSITFSLNNGLPALFVPSSGATSPGGSSGSVEVTFDVYATTVYGQNIYITGDVSELGNWTPANGVALSSANYPTWSATIALPADTTIQYKYVNIDGSTVIWEDAISNREITTPASGTYTEKDTWDES

SEQ ID NO: 130 - protein, 583 aa, Rhizomucor pusillus
ATSDDWKGKAIYQLLTDRFGRADDSTSNCSNLSNYCGGTYEGITKHLDYISGMGFDAIWISPIPKNSDGGYHGYWATDFYQLNSNFGDESQLKALIQAAHERDMYVMLDVVANHAGPTSNGYSGYTFDDASLYHPKCTIDYNNQTSIEQCWVADELPDIDTENSDNVAILNDIVSGWVGNYSFDGIRIDTVKHIRKDFWTGYAEAAGVFATGEVFNGDPAYVGPYQKYLPSLINYPMYYALNDVFVSKSKGFSRISEMLGSNRNAFEDTSVLTTFVDNHDNPRFLNSQSDKALFKNALTYVLLGEGIPIVYYGSEQGFSGGADPANREVLWTTNYDTSSDLYQFIKTVNSVRMKSNKAVYMDIYVGDNAYAFKHGDALVVLNNYGSGSTNQVSFSVSGKFDSGASLMDIVSNITTTVSSDGTVTFNLKDGLPAIFTSATGGTTTTATPTGSGSVTSTSKTTATASKTSTSTSSTSCTTPTAVAVTFDLTATTTYGENIYLVGSISQLGDWETSDGIALSADKYTSSDPLWYVTVTLPAGESFEYKFIRIESDDSVEWESDPNREYTVPQACGTSTATVTDTWR

SEQ ID NO: 131 - protein, 553 aa, Dichotomocladium hesseltinei
QPVNITKRASAADWRSRAIYQVLTDRFARTDGSTSGCSNLSNYCGGTFKGITNKLDYIANLGFDAIWISPIPTNSPGGYHGYWATDFYGINSNFGSSNDLKELVNAAHAKGMYVMLDVVANHAGPTSNGDYSGYTFGSSGLYHNRCSINYNDQRSIEQCWVADDLPDINTENNDNVNKPNNIVSTWVKTYGFDAIRIDTVKHVRKDFWPGYTSAAGVFATGEVFDGNPSYVADYQNYMESLINYPLYYALNDVFASGYSFSRLSNQRVANYHAFKDVSVLPIFIDNHDNPRFLNKKNDIAQFKNALTYVLLGEGIPVVYYGSEQAYAGGADPANREALWSSGFSTNSDMYQFIAKLNRVRQKSNKSVYMDLDVQNNVYAFMHGKSLVVLNNFGNGASRQVTVNVGAQVASNTRLTDVVSGTSVTVSGSSVTFTINNGLPAVFTVSGATSPGGSSGSVEVTFDVYATTVYGQNIYITGDVSELGNWTPANGVALSSANYPTWSATIALPADTTIQYKYVNIDGSTVIWEDAISNREITTPASGTYTEKDTWDES

SEQ ID NO: 132 - protein, 552 aa, Lichtheimia ramosa
RPFVKRATADDWRDRAIYQILTDRFARSDGSTDNCSDLSNYCGGNYQGIIQQLDYIEGMGFDAIWISPIPANADGGYHGYWATDFESLNDHFGSQDDLKALVDAAHERGMYVMLDVVANHAGPTNNGDYSGYTFGSSDLYHPQCSIDYSNQNSIEQCWVADNLPDIDTENDSNVNKLHDIVSTWVSTYGFDGIRIDTVKHVRKDFWPGYASAAGVFATGEVYDGDQTYVGAYQDYLDSLLNYPLYYALNDVFASGQGFQRLSNQRNAIMSAFKDVSVLTSFVDNHDVARFLSTKNDQALFKNALAFVLLGETIPVVYYGSEQGFAGGADPANREALWSSGYDTSSDLYQFIATINNNVRQKSGKKVYMDLDVQDNVYAFMHGDALVVLNNYGSGASNQVSVNVGAQVAESTSFTDAISGTSITVSSGSVTFTLDNGNPAIFVPAGATSPGGSSGSVEVTFDVYATTVYGQNIYITGDVSELGNWTPANGVALSSANYPTWSATIALPADTTIQYKYVNIDGSTVIWEDAISNREITTPASGTYTEKDTWDES

SEQ ID NO: 133 - protein, 587 aa, Penicillium aethiopicum
ARTADWKPRSIYQTMTDRFARTDGSTTSPCNTKAGLYCGGTWRGTIDHLDYIQGMGFDAVMISPIIENIEGRVDYGEAYHGYWPLNLDNLNSHFGTHQDLLDLSDALHSRGMYFMMDTVINNMAYITNGSDPATDIDYSVFTPFNNADYFHPYCTMNWSVPAIAQRCNTGDDTVALPDLFTEHEDVQQLLIKWANKAIKTYSIDGLRIDAAKHVNPDFLRKFSDGVDIFMTGEVLEGSVSIMEDYQSNYINSLPNYPIYFEILSAFTNGNTSQLAIAVENMRVAIPDVNAMASFSENHDKPRIASYNDDMSIAKNVLVFTMLFDGIPMIYQGQEQHLKGDGVPHNREAIWLSKYDTEAELYKLIAKLNRIRNHAGYLGSDYFEDATHPIYQGSSELAFTKGVQGRQVVMVLSNQPSTSGRYALDLAVSYNAGTELMDVLNCNNYTVDNQGVLRVDMDKGEPRVFFPRKYMEGSGLCGYSGATSPGGSSGSVEVTFDVYATTVYGQNIYITGDVSELGNWTPANGVALSSANYPTWSATIALPADTTIQYKYVNIDGSTVIWEDAISNREITTPASGTYTEKDTWDES

SEQ ID NO: 134 - protein, 597 aa, Subulispora sp.
LTPAEWGSQSIYQVLTDRFALTDGSTTASCDLNTYCGGTWLGIQNHLDYIQGMGFTAIWISPIVTNIAGDSVDGDSYHGYWAQDITTVNSAFGTEQDLINLSAALHERGMYLMVDVVNNHMGYLGCGTCVDYSEYTPFNEESYYHPYCPTDYSNLTSIQVCWEGDNIVSLPDLRTEDSDVRSMWYDWITPLVAKYSIDGLRMDSAEHVEKSFWPGWVSASGVYNVGEVDEGDPTIFPDWLNYIDGTLNYPAYYWITQAFQSTSGSISNLVTGVNQLKASMKTSTFGSFLENHDQPRFPSLTSDTDLAKNAIAFAMLADGVPIVYYGQEQGYSGGGVPNDREPLWTSGYSTTSAGYTFIKTINAVRHLAVTQDTAYVAYQAYPIYSDSRVIAMKKSSVLAVFSNIGSSGSGYSITLPAGAFAASQALTDAVSCQTYTADASGGLTFTFGQAPSVFYATASLAGSGLCGTTGTGGSTGTTTASETGGSSPTSTACASVPVTFNEKVTTVVGETIKISGSVAALGDWATGSAVALSAASYTSSNPQWDVTISFAPGTVIEYKYINVASSGAVTWEADPNHTYTVPASCATAAVVSDTWQT

SEQ ID NO: 135 - protein, 601 aa, Trichoderma paraviridescens
LTAAQWRSQSIYQVLTDRFSQTNGATNSACNAGNQVYCGGTWQGIIKNLDYIKSMGFTAIWISPVVENLAGNSADGEAYHGYWAQDIYQVNTNFGSAADLRALSEALHNAGMYLMVDIVTNHMGYLGCGTCVQYNTFNPFNSQSYYHPFCLINFNSSNMTQIQNCWEGDNTVSLPDLATENANVLSMWQTWITQLVANYTIDGLRMDSCFELNYGYFEPFQSSANVYIVGEVDNGDPAIVCPYQKNYGLNTLNYPAYYWITQAFQSTSGSISNLVNGLNTMKSECSDTTLLGSFMENHDNPRFPSLTSDISLAKNAIAFTMLADGIPIIYEGQEQHLNGGGVPNNREAIWLSGYSTSAVLYTHIKALNQIRSQAIKQNSAYVTTQAAVTYSDSSTIVTRKGSTGSQIVGVFSNKGANGNSYTLTLPSADTGFTSNEQVVEILSCTAYTTDSSGNLAVAMAGGLPRVFYARSSLSGSGICPNLGSGGGTPTSTPPTSCTAIPVTFDEKVTTTFGQTIKIAGDISALGNWNTANAVTLSAANYTSSNPLWAITLNLAPGQVVEYKYINVAQNGGVTWEADPNHTYTVPSACTAQPTVANTWQG

SEQ ID NO: 136 - protein, 598 aa, Byssoascus striatosporus
LSADDWRAQSIYQLLTDRFALTNGSTTAPCDTEEQIYCGGSWQGIIDKLDYIQGMGFTAIWISPVVENLSGDSADGEAYHGYWAQNVYEVNPNFGATSDLVALSQVVHDKGMYLMLDVVTNHMGYLGCGTCVDYSVFNPFNEESYYHPFCLIDYDNTTSIEVCWEGDNIVSLPDLRTEDSDVLSTWESWVTELVSNYTVDGIRLDSTEELDQAFLPPFESAAGVYIVGEVDNGDPAVVCPYQEYVSGVLNYPAYYWITQAFESTSGSIGNLVNGINTMKSDCSDTSLLGSFLENHDQPRFASLTSDISLAKNAIAFSMLQDGIPIVYAGEEQHYSGGAVPNDREALWLSGYPTSSTLYTWITSLNQIRSHAIATNSSYLTYNAYPVYSDDSTIVMRKGFADNQIVSVYTNQGADATAYTLDLPSTDTGFTASQSLVEIGGCTTTATDDSGNLAVAMASGLPRIYYPAAGLSGSGVCGQLGSGGGTPTSTPPTSCTAIPVTFDEKVTTTFGQTIKIAGDISALGNWNTANAVTLSAANYTSSNPLWAITLNLAPGQVVEYKYINVAQNGGVTWEADPNHTYTVPSACTAQPTVANTWQG

SEQ ID NO: 137 - protein, 615 aa, Aspergillus brasiliensis
LSAAEWRTQSIYFLLTDRFGRTDNSTTATCNTGDQIYCGGSWQGIINHLDYIQGMGFTAIWISPITEQLPQDTSDGEAYHGYWQQKIYDVNSNFGTADDLKSLSDALHARGMYLMIDVVPNHMGYAGSGNDVDYSVFDPFDSSSYFHPYCLITDWDNLTMVQDCWEGDTIVSLPDLNTTETVVRTIWYDWVADLVSNYSVDGLRIDSVLEVEPDFFPGYQEAAGVYCVGEVDNGNPALDCPYQDYLDGVLNYPIYWQLLYAFESSSGSISDLYNMIKSVASDCSDPTLLGNFIENHDNPRFAYYTSDYSQAKNVLSYIFLSDGIPIVYAGEEQHYSGGDVPYNREATWLSGYDTSAELYTWIATTNAIRKLAIAADSSYITYANDPIYTDSNTIAMRKGTSGSQVITVLSNKGSSGSSYTLTLSGSGYTSGTKLIEAYTCTSVTVDSNGDIPVPMASGLPRVLLPASVVDDSSLCGGSGSSTSTTTSTATATTTSKTSTTSSSSSSSSCTASATAIPITFEELVTTTYGEEIYLSGSISQLGDWDTSDAVKLSADDYTSSNPEWSVTVTLPVGTTFEYKFIKVESGGSVTWESDPNREYTVPECGSGETVVDTWR

SEQ ID NO: 138 - protein, 604 aa, Penicillium subspinulosum
ALSAEWRTQSIYFLLTDRFGRTDNSTTATCDTGDQIYCGGSWQGVINHLDYIQGMGFTAIWISPITEQLSGDTSDGEAYHGYWQQKIYNVNSNFGTADDLVALSDALHARDMYLMLDVVPNHMGYDGDGDDVDYSVFDPFDSSSYFHPYCLITDYDDIEMVQDCWEGDTIVSLPDLNTTETVVQDIWYAWVADLVANYSVDGLRIDSVLEVQPAFFPAYQSAAGVYCVGEVDNGDPTLDCPYQDYLDGILNYPIYYQLLYAFESSSGSISDLYDMINSVASDCSDPTLLGNFIENHDNPRFAYYTSDYSQAKNVASFIFLSDGIPIVYAGQEQHYSGGDVPYDREATWLSGYSTTAELYTWIATTNSIRKLAISLDDDYITYVNDPFYTDENTIAMRKGTSGLQVITVLSNLGADGSAYTLTLSGSGYDSGTDLIEVYTCTSVTVDSSGDIAVPMESGLPRVFLPESSIKDSDLCSGTTTTTTSTAATATATSTSTCTAATEVSIIFEELVTTTYGEEIYLSGSISELGSWDTSDALELSAANYTSSNPEWYLEVTLPVGTSFEYKFIMIESDGTVVWESDPNRSYTVPSACSGAVETVVDTWR

SEQ ID NO: 139 - protein, 606 aa, Penicillium antarcticum
LTPAEWRSQSIYFMLTDRFGRSDNSTTAACNVSDRTYCGGTWQGIINHLDYIQGMGFTAIWITPVTEQLPQDTGDGEAYHGYWQQNIYEVDSNLGTAADLLALSEALHARGMYLMVDVVANHMGYAGAGSSVEYSVFHPFSSSSYFHSYCLISNYDDQSNVEDCWLGDTIVSLPDVDTTQTAVQTLWYDWIGDLVSNYSIDGLRIDTVKHVQKSFWPGYNDAAGVYCVGEIFDGDPAYTCDYQNYMDGVLNYPIYYQLLYAFQSSSGSISDLYDMINSVKSDCADPTLLGNFIENHDNPRFASYTSDYSQAKNVISFLFLSDGIPIIYSGQEQHYSGGADPANREATWLSGYSTTAELYKYIATTNRIRKAAVSADSSYITTKNVPFYQDSHTLAMKKGSSASPVITVLSNYGSSGSSYTLSLSGSGYSSGTNLMEMYTCTSVTVDSSGNIAVPMASGLPRVLMLASSASSICASSTTTSTATVATQTTTLTTTGTSCTQATVLPVLFKELVTTTYGQNVYISGSISQLGSWDTSSAIALSASSYNSSNPLWQVAITLPVGTSFQYKFLEKTTGSTTIQWESDPNRSYTVPTGCVGTTATAIATWR

SEQ ID NO: 140 - protein, 609 aa, Penicillium coprophilum
LTPAEWRSQSIYFLLTDRFGRTDNSVTANCNVNDRVYCGGTWQGIINQLDYIQGMGFTAIWITPVTKQLSQNTGDGTSYHGYWQQDIYNVNPNHGTSDDLLALSKALHARGMYLMVDVVANHMGYAGAGNNVDYSVFTPFNSASYFHSYCLISNYNDQSNVENCWLGDTTVSLPDLDTTQSSVQTLWNNWISDLVSKYSIDGLRVDTVKHVQKSFWPAFNRAAGVYSVGEVFDGSPSYTCDYQKYMDGVLNYPMYYPLLRAFQSTSGSISDLYNMIGTLSSTCADSTLLGNFIENHDNPRFPSYTSDYSQAKNVLSFLFLSDGIPIVYSGQEQHYSGGSDPANREALWLSKYSTTAELYKYIATTNKIRKAAVAADSSYITSKNVAFYQDSHTLAMKKGSGSSPVITVLSNAGSSGSSYTLYLSGSGYSSGTQLMELYTCTSVTVDSSNKIAVPMASGLPRVFVLASSVSNSGLCGSSTPTTTATTATTATQTTTATTTAGGCTQATALPVLFKELVTTSYGQDIYISGSISQLGTWDTSKAVALSADSYTSSNPLWQATITLPVGTTFQYKFIKKANGAITWESDPNRSYTVPTGCSGSTATVTASWK

SEQ ID NO: 141 - protein, 602 aa, Penicillium olsonii
LTPAEWRSQSIYFLLTDRFGRDDNSTTATCNTGDRTYCGGTWQGIINQLDYIQGMGFTAIWITPVTEQLSANTGYGTAYHGYWQQDIYEVNPNHGSSADLKALSAALHARGMYLMVDVVANHMGYNGIGSSVDYSVFNPFSSSSYFHSYCLISNYNDQSNVENCWLGDTTVSLPDLDTTQTAVQTIWNEWITDLVSNYSIDGLRIDTVKHVQKSFWPGFNDAAGVYSVGEIFDGNPSYTCDYQNYLDGVLNYPIYYPLLYAFQSTSGSISDLYNMINTVASDCADSTLLGNFIENHDNPRFPSYTGDYSQAKNVISYLFLSDGIPIIYSGQEQHYSGASDPANREALWLSGYSTTAELYKWIATTNKIRKLAVSADSSYITSKNSPFYQDSHTLGMKKGSVITILSNNGASGSSYTLSLSGSGYSSGTKLMELYTCTSITVDSSGNIPVPMVSGLPRALIPASSIGSNGLCGSTTSPTTTAATQTTTATTTGTCTQATALPVLFKELVTTSYGQNVYISGSISQLGNWDASSAIALSASSYTSSNPLWQVTITLPVGTKFEYKFIEKSSGSATATWESDPNRSYTVPTGCAGTTATVTATWR

SEQ ID NO: 142 - protein, 621 aa, Penicillium vasconiae
LTAAEWRTQSIYFLLTDRFGRTDNSTTATCSVSDRIYCGGSWQGIINHLDYIQGMGFTAIWITPVTEQLSQDTGDGEAYHGYWQQEIYNVNTNYGTAADLLALSKALHSRGMYLMVDVVANHMGYDGAGNTVDYSVFNPFDSSSYFHSYCEISDYSNQTNVEDCWLGDTTVSLPDLDTTLSSVQTIWYNWVTELVSNYSIDGLRIDTVKHVQKSFWPGYNSAAGVYCVGEVFDGDPAYTCPYQSYLDGVLNYPIYYQLLYAFESTSGSISSLYNMINSVASDCSDPTLLGNFIENHDNPRFASYTSDYSQAKNVISFIFFSDGIPIVYAGQEQHYSGGSDPANREATWLSGYDTTATLYKYITSTNKIRSLAISKDTAYITSKNNAFYTDSNTIAMKKGSSGSQVITVLSNRGSSGSSYTLTLSGSGYSSGTQLMEMYTCTAVTVDSSGNIAVPMASGLPRIYMLASSACSICSSSCSTTTTTSTTSTSTTTASTLKTTTSTTSATSTTSTSCTQATALPVLFKEIVTTSYGQNIYISGSISQLGSWDTSNAVALSADQYTSSNNLWYVVVTIPVGTSFEYKFIEETSGSSTITWESDPNRSYTVPTGCAGSTATVTATWR

SEQ ID NO: 143 - protein, 615 aa, Penicillium sp.
LTAAEWRSQSIYFLLTDRFGRTDNSTTATCNVSDRIYCGGSWQGIINHLDYIQGMGFTAIWITPVTEQLSQDTGDGEAYHGYWQQEIYNVNTNYGTAADLLALSKALHSRGMYLMVDVVANHMGYDGAGNTVDYSVFNPFDSSSYFHSYCEITDYSNQTNVEDCWLGDTTVSLPDLNTTLSSVQTIWYDWVAALVSNYSIDGLRIDTVKHVQESFWPEYNSAAGVYCVGEVFDGDPAYTCPYQNYLDGVLNYPIYYQLLYAFESTSGSISDLYNMINSVASDCSDPTLLGNFIENHDNPRFASYTSDYSQAKNVLSFIFFSDGIPIVYAGQEQHYSGGSDPANREATWLSGYDTSAELYTWITSTNKIRSLAVSKDTAYITSKNDAFYTDSNTIAMKKGSGGSQVVTVLSNRGSSGSSYTLTLSGSGYSSGTKLMEMYTCTAVTVDSSGNIAVPMASGLPRVYMLASSACSICSSACSTTTTSSTTSTATTTSTTLKTTTTTTSTSCTQATALPVLFKEIVTTSYGQNIYISGSISELGDWDTSNAVALSADQYTSSNNLWYVVVTIPVGTSFEYKFIEETSGSSSITWESDPNRSYTVPTGCAGSTATVTATWR

SEQ ID NO: 144 - protein, 606 aa, Heterocephalum aurantiacum
LTAAEWRQQSIYFLLTDRFARTDGSTTAACNLSQRAYCGGSWQGIINHLDYIQGMGFTAIWITPVTKQIEASTSDGTAYHGYWQQDIYNINSHYGTADDLRALSSALHSRGMYLMIDVVANHMGYPGAGTSVDYSIFTPFGSSSYFHSYCQITDYDNQSNVENCWLGDNVVSLPDLNTQNSNVRNLWYDWVEELVANYSVDGLRVDTVKHVEKDFWPSYNAAAGVYCVGEVFHGDPAYTCPYQNYMDGVLNYPIYYQLLYAFQSSSGSITDLYNMINSVASDCKDPTTLGNFIENHDNPRFPSYTSDMSQAKSVIAFLFLSDGIPIIYAGQEQHYSGGADPNNREAIWLSGYSTSSTLYQFISSTNSIRKLAISKDSSYLTSRNNPFYTDSNTIAMRKGSSGSQVITVLSNKGSSGNSYTLTLTNHGYSSGAQLTELYTCSSIQVASSGGLAVPMASGLPRVLVPSSWIQGSGLCGGGSTTTTTTATTTTTTTTSTSSCAAATSLAVVFNELVTTYYGENIFIAGSISQLGSWDTGKSVALSASQYTSSNPLWTATVSLPVGTSFQYKFIKKEPDGQVVWESDPNRSYTVPAGCAGTTQTVNTSWR

SEQ ID NO: 145 - protein, 602 aa, Neosartorya massa
LTPAEWRSQSIYFLLTDRFGREDNSTTAACDVTQRLYCGGSWQGIINHLDYIQGMGFTAIWITPVTEQFYEDTGDGTSYHGYWQQNIYEVNYNYGTAQDLKNLADALHARGMYLMVDVVANHMGYDGAGNTVDYSVFTPFDSSSYFHPYCLISDYSNQTNVEDCWLGDTTVSLPDLDTTDTTVRTIWYDWVKGLVANYSIDGLRIDTVKHVEKDFWPGYNDAAGVYCVGEVFSGDPTYTCPYQNYLDGVLNYPIYYQLLYAFESTSGSISNLYDMINSVASDCADPTLLGNFIENHDNPRFASYTSDYSQAKNVISFIFFSDGIPIVYAGQEQHYSGGADPANREAVWLSGYSTSATLYSWIASTNRIRKLAISKDAAYITSKNNPFYYDSNTLAMRKGSIAGAQVITVLSNKGSSGSSYTLSLSGTGYSAGASLVEMYTCTTLTVDSSGNLPVPMASGLPRVLVPSSWVSGSGLCGSGSTTTTTTTATATTTACTSATALPIVFEEVVTTTYGENVYLTGSISQLGNWDTSSAIALSASKYTSSNPEWYVTVTLPVGTSFQYKFFKKESDGSIVWESDPNRSYTVPTGCAGTTVTVSDTWR

SEQ ID NO: 146 - protein, 588 aa, Penicillium janthinellum
ATPAQWRSQSIYFMLTDRFARTDGSTTAPCDTSQRAYCGGTWQGIIDKLDYIQGMGFTAIWITPVTGQLDGDTGDGTAYHGYWQQDIYSLNSNYGTASDLKALASALHARGMYLMVDVVANHMGYNGAGNTVDYSVFDAFNSNQYFHSYCEVTNYSNQTNVEDCWLGDTTVSLPDLNTELSSVQSIWYNWVGSLVSNYSIDGLRVDTVKHVQKDFWPGYNKAAGVYCVGEVFDGDASYTCPYQEVMDGVLNYPMYYPLLRAFQSTSGSMSDLYNMINTVKSTCSDSTLLGTFVENHDNPRFASYTNDMSLAKNVAAFTIMADGIPIIYAGQEQHYSGGSDPANREAVWLSGYNTDSALYKLIAKVNAIRSYAISQSASYVTYKNYPIYQDASTLAMRKGSSGTQTITVLSNRGASGSQYTLSLGNTGYSTGTTLTEIITCAKITVDSSGNVPVPMASGEPRILYPSSSIKGSAICASSGRGATSPGGSSGSVEVTFDVYATTVYGQNIYITGDVSELGNWTPANGVALSSANYPTWSATIALPADTTIQYKYVNIDGSTVIWEDAISNREITTPASGTYTEKDTWDES

SEQ ID NO: 147 - protein, 589 aa, Aspergillus brasiliensis
ATPAEWRSQSIYFLLTDRFARTDNSTTASCDLSARQYCGGSWQGIINQLDYIQGMGFTAIWVTPVTAQIPQDTGYGQAYHGYWQQDAYALNSHYGTADDLKALATALHSRGMYLMVDVVANHMGHNGTGSSVEYSVYNPFNAKKYFHNLCWISNYDNQTNVEDCWLGDNTVALPDLDTTRTDVKNMWYDWVKSLVSNYSVDGLRVDTVKNVQKNFWPGYNNASGVYCIGEVFDGDASYTCPYQDDLDGVLNYPMYYPLLRAFKSTTGSISDLYNMINTVKSTCKDSTLLGTFIENHDNPRFANYTSDMSLAKNVATFTILADGIPIIYAGQEQHYSGGNDPYNREATWLSGYKTTSELYTHIAASNKIRTHAIKQDSGYLTYKNYPIYQDTSTLAMRKGYNGTQTITVLSNLGASGSSYTLSLPGTGYTAGQKITEIYTCTNLTVNSNGSVPVPMKSGLPRILYPTDKLVNGSSFCSSSGRGATSPGGSSGSVEVTFDVYATTVYGQNIYITGDVSELGNWTPANGVALSSANYPTWSATIALPADTTIQYKYVNIDGSTVIWEDAISNREITTPASGTYTEKDTWDES

SEQ ID NO: 148 - protein, 588 aa, Aspergillus westerdijkiae
ATPAQWRSQSIYFLLTDRFARDDGSTTATCNTEDRKYCGGTWQGIIDQLDYIQGMGFTAIWITPVTAQLTEDTKYGDAYHGYWQQDIYSLNENYGTADDLKALADALHERDMYLMVDVVANHMGYAGAGDSVDYSVFNPFNSQDYFHSFCLIQDYNDQTQSEDCWLGDNSVSLPDLDTTKSEVQDIWYDWVGGLVSNYSIDGLRIDTVKHVQKEFWPGYNDAAGVYCIGEILDGDASYTCPYQEVLDGVLNYPIYYPLLNAFKSTSGSISDLYNMINTVKSDCPDSTLMGTFIENHDNPRFASYTDDIALAKNVAAFTILADGIPIVYAGQEQHYAGGEDPANREATWLGKYNTDSELYKLIAASNAIRNHAISTDKEYVNYKNYPIYKDDSTIAMRKGFDGAQIITVLSNQGSSGSSYTLSLGDTGFSSGDKLTEIYTCTAVTVDSDGKVPVPMDGGAPRALFPTEKLSGSSLCSGSGRGATSPGGSSGSVEVTFDVYATTVYGQNIYITGDVSELGNWTPANGVALSSANYPTWSATIALPADTTIQYKYVNIDGSTVIWEDAISNREITTPASGTYTEKDTWDES

SEQ ID NO: 149 - protein, 476 aa, Hamigera avellanea
ATPADWRSRSIYFILTDRFARTDGSTTAECDTSARAYCGGTWRGIINKLDYIQNMGFTAIWITPVTAQLPGSTGHGSAYHGYWQQDIYSLEPNYGTADDLRALASALHERNMYLMVDVVANHMGWAGSGDSVDYSVFNPFDSADYFHPYCLISNYEDQTEVENCWLGDTNVALVDLDTTRSDVQNIWYEWVDSLVGNYSIDGLRIDTVRHVQKDFWPGFNDAAGVYSVGEVFSGDTAYTCPYQEVLDGVLNYPIYYPLLRAFQSTSGSINDLYNMINTVKSDCADSTLMGTFLENHDNPRFASYTSDVALAKNAIAFTILSDGIPIIYAGQEQHYSGGNDPANREAVWLSGYSTDSELYSFVAVTNQIRNYAISQDQGYVTWKNVPIYQDTSTLAMRKGTDGSQVITVLSNLGASGSSYTLTLGGSGYSSGQQLTEIFSCATVTVDSSGNIPVPMGSGQPKVFYPTAGLGGSGICQ

SEQ ID NO: 150 - protein, 586 aa, Hamigera avellanea
ATPADWRSRSIYFILTDRFARTDGSTTAECDTSARAYCGGTWRGIINKLDYIQNMGFTAIWITPVTAQLPGSTGHGSAYHGYWQQDIYSLEPNYGTADDLRALASALHERNMYLMVDVVANHMGWAGSGDSVDYSVFNPFDSADYFHPYCLISNYEDQTEVENCWLGDTNVALVDLDTTRSDVQNIWYEWVDSLVGNYSIDGLRIDTVRHVQKDFWPGFNDAAGVYSVGEVFSGDTAYTCPYQEVLDGVLNYPIYYPLLRAFQSTSGSINDLYNMINTVKSDCADSTLMGTFLENHDNPRFASYTSDVALAKNAIAFTILSDGIPIIYAGQEQHYSGGNDPANREAVWLSGYSTDSELYSFVAVTNQIRNYAISQDQGYVTWKNVPIYQDTSTLAMRKGTDGSQVITVLSNLGASGSSYTLTLGGSGYSSGQQLTEIFSCATVTVDSSGNIPVPMGSGQPKVFYPTAGLGGSGICQSSGATSPGGSSGSVEVTFDVYATTVYGQNIYITGDVSELGNWTPANGVALSSANYPTWSATIALPADTTIQYKYVNIDGSTVIWEDAISNREITTPASGTYTEKDTWDES

SEQ ID NO: 151 - protein, 576 aa, Meripilus giganteus
RPTVFDAGADAHSLHARAPSGSKDVIIQMFEWNWDSVAAECTNFIGPAGYGFVQVSPPQETIQGAQWWTDYQPVSYTLTGKRGDRSQFANMITTCHAAGVGVIVDTIWNHMAGVDSGTGTAGSSFTHYNYPGIYQNQDFHHCGLEPGDDIVNYDNAVEVQTCELVNLADLATDTEYVRGRLAQYGNDLLSLGADGLRLDASKHIPVGDIANILSRLSRSVYITQEVIFGAGEPITPNQYTGNGDVQEFRYTSALKDAFLSSGISNLQDFENRGWVPGSGANVFVVNHDTERNGASLNNNSPSNTYVTATIFSLAHPYGTPTILSSYDGFTNTDAGAPNNNVGTCSTSGGANGWLCQHRWTAIAGMVGFRNNVGSAALNNWQAPQSQQIAFGRGALGFVAINNADSAWSTTFTTSLPDGSYCDVISGKASGSSCTGSSFTVSGGKLTATVPARSAIAVHTGQKGSGGATPTSAPSTTPTSGTVSMTFAEQATTTFGENIFLVGSISQLGNWNPASAIALSSAAYPTWSVSVNIPAGTTFQYKFIRKETDGSVVWESDPNRQATAPASGTTTLTSSWR

SEQ ID NO: 152 - protein, 575 aa, Cerrena unicolor
RPLNASNALDARAPSGAKSVIIQMFEWTWDSVAAECTNFIGPAGYGFVQVSPPQETIQGDQWWTDYQPVSYILTSKRGTRDQFAAMIDTCHDAGVKVIVDTIWNHMAGVESGTGVAGSSFTHYNYPGIYQNQDFHHCGLESGDDIVNYDNAQEVQTCELVNLADLATETDYVRGRLAEYGNDLLSLGADGLRLDAAKHIAVGDLANIIGRLNSTPYITQEVIFGSGEPITPNQYTGNGDVQKFRYTSALKDAFLNGDISSLQDFENRGWVAGSGANVFVTNHDTERNGNSLNNNSPNNAYTLAMIFSLAHPYGTPSILSSYSGFTDTDAGAPNGGAGTCSGSGGSNGWLCQHRWTAVAGMVGFRNTVGSAALNNWVSPQSSQIAFGRGALGFVAINNGDSTWSTTFTTSLPDGTYCDVITGTSSSGSCTGSSFTVSGGTFTANVAARDAVAIHTGATGTGSGSGNTSTGSGGTTSDTVSVSFAETATTTFGENIFLVGSISQLGAWDPASAIALSSASYPTWTVTVTLPAGTTFEYKFIRKETDGSVVWESDPNRQATTPSSSDAATTTLSTSWR

SEQ ID NO: 153 - protein, 562 aa, Physalacria cryptomeriae
APFLELQVRAPSSTKQVIIQMFEWTWDSVAAECTDFIGPAGYGYVQVSPPAEHITGDQWWTDYQPVSYILTSKRGNRSQFANMVTTCHTAGVLVIADALFNHMAGIESGTGTAGSSFTHYDYPGIYQTQDFHHCGLTSGDDISDYSSQAQVQTCELVNLADLATDTEYVRAKLASYANDLISLGVNGLRLDAAKHIATDDIKNILSRLSSTVYITQEVIFGSGEPVTPSMYTQNGDVQEFRYTSTLQSAFSGGDISQLQNLDSKGWIAGTSANVFVANHDTERGGSSLNYKSSSNTYVTATIFSLAHPYGTPTILSSYEFSDTDAGSPNGGAGTCSTTGGANGWLCQHRWVAFSGMVGFHNNVGTASLTNWVSPQSNQIAFERSGKGFVAINNADSAWTATFTTSLAAGSYCDVITGTSNGSACSGTSYTVSGGSFSATVAARSAVAIHTGATGSGSGGGGGSTGSVAITFQETATTTLGENIFLVGSISQLRTWAPASAIALSSASYPTWSVTVSIPAGTTFEYKFIRKESDGSVVWESDPNRSATASSSASTQTILTSWR

SEQ ID NO: 154 - protein, 578 aa, Lenzites betulinus
RPASTVFHGAETRSLDARAPSGSKDVIIQMFEWTWDSVAAECTNFIGPAGYGFVQGSPPQEHIQGAQWWTDYQPVSYTLTSKRGDRTSFANMIQTCHTAGVGVIVDTLFNHMAGVDSGTGVAGSSFTHYNYPGIYQNQDFHHCGLEPGDDIVNYDNAVEVQTCELDNLADLATETEYVRGRLAQYGNDLLSLGADGMRLDAAKHIAVGDIANILSRLNRTVYITQEVIFGAGEPITPNQYTGNGDVQEFRYTSALQDAFLNSGIANLQVLENRGWVPGSGANVFVTNHDTERNGASLNNNSPSNTYVTAMIFSLAHPFGTPSILSSYSGFTDTDAGAPNGGVGTCSGSGGTNGWLCQHRWTAVAGMVGFRNQVGSAALGNWQSPQSQQIAFGRGALGFVAINNADSAWSATFTTSLPDGSYCDVISGQTSGSTCTGSSFTVSGGSLSATVPARSAIAVHTGQKGTGSGSGTGTGGGGSTGSGNVAVNFAETATTTFGENIFVVGSISQLGTWNTANAIALSSPSYPTWTVSISIPAGTTFQYKFIRKETDGSVVWESDPNRQATAPASGSTTLSTSWR

SEQ ID NO: 155 - protein, 571 aa, Trametes ljubarskyi
RPATFDAADARSVQPRAPSGSKDVIIQMFEWTWDSVAAECTNFIGPAGYGFVQGNPPQEHIQGDQWWTDYQPVSYILTSKRGDRTAFANMISTCHAAGVGVIVDTIFNHMSGVDSGTGVAGSSFTHYNYPGIYQNQDFHHCGLEPGDDIVNYDNAVEVQTCELENLADLATDTEYVRGRLAQYANDLLSLGADGLRLDAAKHIPTGDIANILSRLNRSVYITQEVIYGDGEPITPNQYTGNGDVQEFRYTTALKNAFLGGGISSLQSFDNLGWVPGTGANVFVTNHDTERNGNSLNNNSPSNTYVTAMIFSLAHPYGTPTILSSYSGFTNTDAGAPNGGTGTCSGSGGANGWLCQHRWTAVAGMVGFRNNVGSAALTNWQSPQSQQIAFGRGALGFVAINNADSAWSTTFTTSLPDGSYCDVVSGTSSNGGCTGSSFSVSGGSLTATVPARSAIAIHTGETGSGSNSGGGSGGSGTVTINFAETATTTFGENIFVVGSIPQLGSWNPANAIALSSASYPTWTVSVSVPAGTTFEYKFIRKETDGSVVWESDPNRSDTAPASGTQTITTSWR

SEQ ID NO: 156 - protein, 451 aa, Bacillus subtilis
GPAAASAETANKSNELTAPSIKSGTILHAWNWSFNTLKHNMKDIHDAGYTAIQTSPINQVKEGNQGDKSMSNWYWLYQPTSYQIGNRYLGTEQEFKEMCAAAEEYGIKVIVDAVINHTTFDYAAISNEVKSIPNWTHGNTQIKNWSDRWDVTQNSLLGLYDWNTQNTQVQSYLKRFLERALNDGADGFRFDAAKHIELPDDGSYGSQFWPNITNTSAEFQYGEILQDSASRDAAYANYMDVTASNYGHSIRSALKNRNLGVSNISHYAYDVSADKLVTWVESHDTYANDDEESTWMSDDDIRLGWAVIASRSGSTPLFFSRPEGGGNGVRFPGKSQIGDRGSALFEDQSITAVNRFHNVMAGQPEELSNPNGNNQIFMNQRGSHGVVLANAGSSSVSINTPTKLPDGRYDNKAGAGSFQVNDGKLTGTINARSVAVLYPDDIEIRCNTFFQ

SEQ ID NO: 157 - protein, 633 aa, Bacillus subtilis
GPAAASAETANKSNELTAPSIKSGTILHAWNWSFNTLKHNMKDIHDAGYTAIQTSPINQVKEGNQGDKSMSNWYWLYQPTSYQIGNRYLGTEQEFKEMCAAAEEYGIKVIVDAVINHTTSDYAAISNEVKSIPNWTHGNTQIKNWSDRWDVTQNSLLGLYDWNTQNTQVQSYLKRFLDRALNDGADGFRFDAAKHIELPDDGSYGSQFWPNITNTSAEFQYGEILQDSASRDAAYANYMDVTASNYGHSIRSALKNRNLGVSNISHYASDVSADKLVTWVESHDTYANDDEESTWMSDDDIRLGWAVIASRSGSTPLFFSRPEGGGNGVRFPGKSQIGDRGSALFEDQAITAVNRFHNVMAGQPEELSNPNGNNQIFMNQRGSHGVVLANAGSSSVSINTATKLPDGRYDNKAGAGSFQVNDGKLTGTINARSVAVLYPDDIAKAPHVFLENYKTGVTHSFNDQLTITLRADANTTKAVYQINNGPETAFKDGDQFTIGKGDPFGKTYTIMLKGTNSDGVTRTEKYSFVKRDPASAKTIGYQNPNHWSQVNAYIYKHDGSRVIELTGSWPGKPMTKNADGIYTLTLPADTDTTNAKVIFNNGSAQVPGQNQPGFDYVLNGLYNDSGLSGSLPH

SEQ ID NO: 158 - protein, 487 aa, Schwanniomyces occidentalis; identical to SEQ ID NO: 79

SEQ ID NO: 159 - protein, 583 aa, Rhizomucor pusillus
ATSDDWKGKAIYQLLTDRFGRADDSTSNCSNLSNYCGGTYEGITKHLDYISGMGFDAIWISPIPKNSDGGYHGYWATDFYQLNSNFGDESQLKALIQAAHERDMYVMLDVVANHAGPTSNGYSGYTFGDASLYHPKCTIDYNDQTSIEQCWVADELPDIDTENSDNVAILNDIVSGWVGNYSFDGIRIDTVKHIRKDFWTGYAEAAGVFATGEVFNGDPAYVGPYQKYLPSLINYPMYYALNDVFVSKSKGFSRISEMLGSNRNAFEDTSVLTTFVDNHDNPRFLNSQSDKALFKNALTYVLLGEGIPIVYYGSEQGFSGGADPANREVLWTTNYDTSSDLYQFIKTVNSVRMKSNKAVYMDIYVGDNAYAFKHGDALVVLNNYGSGSTNQVSFSVSGKFDSGASLMDIVSNITTTVSSDGTVTFNLKDGLPAIFTSATGGTTTTATPTGSGSVTSTSKTTATASKTSTSTSSTSCTTPTAVAVTFDLTATTTYGENIYLVGSISQLGDWETSDGIALSADKYTSSDPLWYVTVTLPAGESFEYKFIRIESDDSVEWESDPNREYTVPQACGTSTATVTDTWR

SEQ ID NO: 160 - protein, 616 aa, Aspergillus niger
AEWRTQSIYFLLTDRFGRTDNSTTATCDTGDQIYCGGSWQGIINHLDYIQGMGFTAIWISPITEQLPQDTADGEAYHGYWQQKIYDVNSNFGTADDLKSLSDALHARGMYLMVDVVPNHMGYAGNGNDVDYSVFDPFDSSSYFHPYCLITDWDNLTMVQDCWEGDTIVSLPDLNTTETAVRTIWYDWVADLVSNYSVDGLRIDSVLEVEPDFFPGYQEAAGVYCVGEVDNGNPALDCPYQKVLDGVLNYPIYWQLLYAFESSSGSISNLYNMIKSVASDCSDPTLLGNFIENHDNPRFASYTSDYSQAKNVLSYIFLSDGIPIVYAGEEQHYSGGKVPYNREATWLSGYDTSAELYTWIATTNAIRKLAISADSAYITYANDAFYTDSNTIAMRKGTSGSQVITVLSNKGSSGSSYTLTLSGSGYTSGTKLIEAYTCTSVTVDSSGDIPVPMASGLPRVLLPASVVDSSSLCGGSGRTTTTTTAATSTSKATTSSSSSSAAATTSSSCTATSTTLPITFEELVTTTYGEEVYLSGSISQLGEWDTSDAVKLSADDYTSSNPEWSVTVSLPVGTTFEYKFIKVDEGGSVTWESDPNREYTVPECGNGSGETVVDTWR

SEQ ID NO: 161 - protein, 512 aa, Bacillus stearothermophilus
APFNGTMMQYFEWYLPDDGTLWTKVANEANNLSSLGITALWLPPAYKGTSRSDVGYGVYDLYDLGEFNQKGTVRTKYGTKAQYLQAIQAAHAAGMQVYADVVFDHKGGADGTEWVDAVEVNPSDRNQEISGTYQIQAWTKFDFPGRGNTYSSFKWRWYHFDGVDWDESRKLSRIYKFRGKAWDWEVDTEFGNYDYLMYADLDMDHPEVVTELKNWGKWYVNTTNIDGFRLDAVKHIKFSFFPDWLSYVRSQTGKPLFTVGEYWSYDINKLHNYITKTDGTMSLFDAPLHNKFYTASKSGGAFDMRTLMTNTLMKDQPTLAVTFVDNHDTEPGQALQSWVDPWFKPLAYAFILTRQEGYPCVFYGDYYGIPQYNIPSLKSKIDPLLIARRDYAYGTQHDYLDHSDIIGWTREGGTEKPGSGLAALITDGPGGSKWMYVGKQHAGKVFYDLTGNRSDTVTINSDGWGEFKVNGGSVSVWVPRKTTVSTIARPITTRPWTGEFVRWTEPRLVAWP

SEQ ID NO: 162 - protein, 483 aa, Bacillus halmapalus
HHNGTNGTMMQYFEWHLPNDGNHWNRLRDDASNLRNRGITAIWIPPAWKGTSQNDVGYGAYDLYDLGEFNQKGTVRTKYGTRSQLESAIHALKNNGVQVYGDVVMNHKGGADATENVLAVEVNPNNRNQEISGDYTIEAWTKFDFPGRGNTYSDFKWRWYHFDGVDWDQSRQFQNRIYKFRGKAWDWEVDSENGNYDYLMYADVDMDHPEVVNELRRWGEWYTNTLNLDGFRIDAVKHIKYSFTRDWLTHVRNATGKEMFAVAEFWKNDLGALENYLNKTNWNHSVFDVPLHYNLYNASNSGGNYDMAKLLNGTVVQKHPMHAVTFVDNHDSQPGESLESFVQEWFKPLAYALILTREQGYPSVFYGDYYGIPTHSVPAMKAKIDPILEARQNFAYGTQHDYFDHHNIIGWTREGNTTHPNSGLATIMSDGPGGEKWMYVGQNKAGQVWHDITGNKPGTVTINADGWANFSVNGGSVSIWVKR

SEQ ID NO: 163 - protein, 478 aa, Aspergillus oryzae
ATPADWRSQSIYFLLTDRFARTDGSTTATCNTADQKYCGGTWQGIIDKLDYIQGMGFTAIWITPVTAQLPQTTAYGDAYHGYWQQDIYSLNENYGTADDLKALSSALHERGMYLMVDVVANHMGYDGAGSSVDYSVFKPFSSQDYFHPFCFIQNYEDQTQVEDCWLGDNTVSLPDLDTTKDVVKNEWYDWVGSLVSNYSIDGLRIDTVKHVQKDFWPGYNKAAGVYCIGEVLDGDPAYTCPYQNVMDGVLNYPIYYPLLNAFKSTSGSMDDLYNMINTVKSDCPDSTLLGTFVENHDNPRFASYTNDIALAKNVAAFIILNDGIPIIYAGQEQHYAGGNDPANREATWLSGYPTDSELYKLIASANAIRNYAISKDTGFVTYKNWPIYKDDTTIAMRKGTDGSQIVTILSNKGASGDSYTLSLSGAGYTAGQQLTEVIGCTTVTVGSDGNVPVPMAGGLPRVLYPTEKLAGSKICSSS

SEQ ID NO: 164 - protein, 483 aa, Bacillus amyloliquefaciens
VNGTLMQYFEWYTPNDGQHWKRLQNDAEHLSDIGITAVWIPPAYKGLSQSDNGYGPYDLYDLGEFQQKGTVRTKYGTKSELQDAIGSLHSRNVQVYGDVVLNHKAGADATEDVTAVEVNPANRNQETSEEYQIKAWTDFRFPGRGNTYSDFKWHWYHFDGADWDESRKISRIFKFRGEGKAWDWEVSSENGNYDYLMYADVDYDHPDVVAETKKWGIWYANELSLDGFRIDAAKHIKFSFLRDWVQAVRQATGKEMFTVAEYWQNNAGKLENYLNKTSFNQSVFDVPLHFNLQAASSQGGGYDMRRLLDGTVVSRHPEKAVTFVENHDTQPGQSLESTVQTWFKPLAYAFILTRESGYPQVFYGDMYGTKGTSPKEIPSLKDNIEPILKARKEYAYGPQHDYIDHPDVIGWTREGDSSAAKSGLAALITDGPGGSKRMYAGLKNAGETWYDITGNRSDTVKIGSDGWGEFHVNDGSVSIYVQK

SEQ ID NO: 165 - protein, 583 aa, Rhizomucor pusillus; identical to SEQ ID NO: 130

SEQ ID NO: 166 - protein, 623 aa, Kionochaeta ivoriensis
LSPAGWRQQSIYQVMTDRFARTDGSTIASCDTSQQAYCGGTWQGLINKLDYIQGMGFTAVWISPMVHQMAGATSDGESYHGYWAQDINTVNSAFGTAADLKALSAALHARGMYLMLDVVTNHFAYDGCGTCVDYSIFNPFNSESYFHPFCLIDYSNTTSIQVCWEGDNTVSLPDLRTEDSDVRSIWNSWISSVISTYGVDGLRVDSAQQVETSFWAGFEAAAGVYMVGEVFNGDPTYVTPFQDYMDGVLNYPAYYWITQAFESTSGSISNLANGMNTMKSLAKNTSLLGSFLENHDNPRFPSLTSDMSLAQNAIAFTMLMDGIPIIYQGQEQHFSGGGVPSDREAVWLSGYPNDTTLYAWITKLNAVRSWAIAKDSSYLAYMAYPVYTDTHTIAMRKGDTGYQVISVYTNVGASGSSYSVTLTSADTGFTASQSVVDLVGCKTYTADSTGSLSLSLTGGIPIILYPAASLTGNTICTSTGGTTTTATPTGSGSVTSTSKTTATASKTSTSTSSTSCTTPTAVAVTFDLTATTTYGENIYLVGSISQLGDWETSDGIALSADKYTSSDPLWYVTVTLPAGESFEYKFIRIESDDSVEWESDPNREYTVPQACGTSTATVTDTWR

SEQ ID NO: 167 - protein, 588 aa, Aspergillus niger
LSAAEWRTQSIYFLLTDRFGRTDNSTTATCDTGDQIYCGGSWQGIINHLDYIQGMGFTAIWISPITEQLPQDTADGEAYHGYWQQKIYDVNSNFGTADDLKSLSDALHARGMYLMVDVVPNHMGYAGNGNDVDYSVFDPFDSSSYFHPYCLITDWDNLTMVQDCWEGDTIVSLPDLNTTETAVRTIWYDWVADLVSNYSVDGLRIDSVLEVEPDFFPGYQEAAGVYCVGEVDNGNPALDCPYQKVLDGVLNYPIYWQLLYAFESSSGSISNLYNMIKSVASDCSDPTLLGNFIENHDNPRFASYTSDYSQAKNVLSYIFLSDGIPIVYAGEEQHYSGGKVPYNREATWLSGYDTSAELYTWIATTNAIRKLAISADSAYITYANDAFYTDSNTIAMRKGTSGSQVITVLSNKGSSGSSYTLTLSGSGYTSGTKLIEAYTCTSVTVDSSGDIPVPMASGLPRVLLPASVVDSSSLCGGSGRGATSPGGSSGSVEVTFDVYATTVYGQNIYITGDVSELGNWTPANGVALSSANYPTWSATIALPADTTIQYKYVNIDGSTVIWEDAISNREITTPASGTYTEKDTWDES

SEQ ID NO: 168 - protein, 588 aa, Aspergillus oryzae
ATPADWRSQSIYFLLTDRFARTDGSTTATCNTADQKYCGGTWQGIIDKLDYIQGMGFTAIWITPVTAQLPQTTAYGDAYHGYWQQDIYSLNENYGTADDLKALSSALHERGMYLMVDVVANHMGYDGPGSSVDYSVFVPFNSASYFHPFCFIQNWDNQTQVEDCWLGDNTVSLPDLDTTKDVVKNEWYDWVGSLVSNYSIDGLRIDTVKHVQKDFWPGYNKAAGVYCIGEVLDGDPAYTCPYQEVLDGVLNYPIYYPLLNAFKSTSGSMDDLYNMINTVKSDCPDSTLLGTFVENHDNPRFASYTNDIALAKNVAAFIILNDGIPIIYAGQEQHYAGGNDPANREATWLSGYPTDSELYKLIASANAIRNYAISKDTGFVTYKNWPIYKDDTTIAMRKGTDGSQIVTILSNKGASGDSYTLSLSGAGYTAGQQLTEVIGCTTVTVDSSGDVPVPMAGGLPRVLYPTEKLAGSKICSSSGRGATSPGGSSGSVEVTFDVYATTVYGQNIYITGDVSELGNWTPANGVALSSANYPTWSATIALPADTTIQYKYVNIDGSTVIWEDAISNREITTPASGTYTEKDTWDES

SEQ ID NO: 169 - protein, 583 aa, Penicillium canescens
LTPAEWRSQSIYFMLTDRFGRSDNSTTAACNVSDRTYCGGTWQGIINHLDYIQGMGFTAIWITPVTEQLPQDTGDGEAYHGYWQQNIYEIDSKLGTAADLLALSKALHARGMYLMVDVVANHMGYAGSGNSVDYSVFNPFSSSSYFHSYCLISNYDDQSNVENCWLGDTIVSLPDLDTTQTAVQTIWYDWIADLVSNYSIDGLRIDTVKHVQKSFWPGYNDAAGVYCVGEIFDGDPAYTCDYQNYMDGVLNYPIYYQLLYAFQSSSGSISDLYNMINSVKSDCADSTLLGNFIENHDNPRFASYTSDYSQAKNVISFLFLSDGIPIIYSGQEQHYSGGADPANREATWLSGYSTTAELYKYIATTNKIRKLAVSDSSYLTTKNVPFYQDSHTLAMKKGSSASPVITVLSNYGSSGSSYTLSLSGSGYSSGTKLMEMYTCTSVTVDSSGNIAVPMASGLPRVLMLASSANSLCGSSGATSPGGSSGSVEVTFDVYATTVYGQNIYITGDVSELGNWTPANGVALSSANYPTWSATIALPADTTIQYKYVNIDGSTVIWEDAISNREITTPASGTYTEKDTWDES

SEQ ID NO: 170 - protein, 583 aa, Acidomyces acidothermus
LTPAQWRGQSIYQVLTDRFGRTDDSTTAACDVNDYCGGSWQGIINHLDYIQDMGFSAIWISPVVENLVGDTQDGSAYHGYWAQNIYALNPNFGTVSDLVALSAALHQRGMYLMVDVVTNHMGYDGCGDCVDYSVFTPFNSQSYFHPFCLIDYNNSTSIKVCWEGDNIVSLPDMRTEDSDVATEWNTWISELVSNYSIDGLRIDSAQQVDNAFFPPFQAAAGGIHVLGEVFNGDPNYVCPYQDFMSGVLNYPAYYYITQAFQSTSGSISNLVNGINQMKSTCTDTTLLGSFLENHDNPRFPSYTSDLSLDKNAITFTILQDGIPIIYEGQEQHYSGGTVPNNREAIWLSGYDKSAPLYTWIASVNQIRNQAIFKDSNYLTYMAWPIYSDASTIAMRKGFDGLQIISVYSNKGASAASYTISLESSTTGFTANEALVEVMSCTTYTTDGSGNLAVTISGGLPAVFYPKAQLAGSGICGATSPGGSSGSVEVTFDVYATTVYGQNIYITGDVSELGNWTPANGVALSSANYPTWSATIALPADTTIQYKYVNIDGSTVIWEDAISNREITTPASGTYTEKDTWDES

SEQ ID NO: 171 - protein, 586 aa, Kinochaeta ivoriensis
LSPAGWRQQSIYQVMTDRFARTDGSTIASCDTSQQAYCGGTWQGLINKLDYIQGMGFTAVWISPMVHQMAGATSDGESYHGYWAQDINTVNSAFGTAADLKALSAALHARGMYLMLDVVTNHFAYDGCGTCVDYSIFNPFNSESYFHPFCLIDYSNTTSIQVCWEGDNTVSLPDLRTEDSDVRSIWNSWISSVISTYGVDGLRVDSAQQVETSFWAGFEAAAGVYMVGEVFNGDPTYVTPFQDYMDGVLNYPAYYWITQAFESTSGSISNLANGMNTMKSLAKNTSLLGSFLENHDNPRFPSLTSDMSLAQNAIAFTMLMDGIPIIYQGQEQHFSGGGVPSDREAVWLSGYPNDTTLYAWITKLNAVRSWAIAKDSSYLAYMAYPVYTDTHTIAMRKGDTGYQVISVYTNVGASGSSYSVTLTSADTGFTASQSVVDLVGCKTYTADSTGSLSLSLTGGIPIILYPAASLTGNTICTSGATSPGGSSGSVEVTFDVYATTVYGQNIYITGDVSELGNWTPANGVALSSANYPTWSATIALPADTTIQYKYVNIDGSTVIWEDAISNREITTPASGTYTEKDTWDES

SEQ ID NO: 172 - protein, 585 aa, Aspergillus terreus
LTPAEWRSQSIYFLLTDRFGRTDNSTTAACDTSDRVYCGGSWQGIINQLDYIQGMGFTAIWITPVTGQFYENTGDGTSYHGYWQQDIYDLNYNYGTAQDLKNLANALHERGMYLMVDVVANHMGYDGAGNTVDYSVFNPFSSSSYFHPYCLISNYDNQTNVEDCWLGDTTVSLPDLDTTSTAVRNIWYDWVADLVANYSIDGLRVDTVKHVEKDFWPGYNSAAGVYCVGEVYSGDPAYTCPYQNYMDGVLNYPIYYQLLYAFESSSGSISDLYNMISSVASSCKDPTLLGNFIENHDNPRFASYTSDYSQAKNVITFIFLSDGIPIVYAGQEQHYSGGSDPANREATWLSGYSTSATLYTWIATTNQIRSLAISKDAGYVQAKNNPFYSDSNTIAMRKGTTAGAQVITVLSNKGASGSSYTLSLSGTGYSAGVTLVETYTCTTVTVDSSGNLPVPMTSGLPRVFVPSSWVNGSALCNGATSPGGSSGSVEVTFDVYATTVYGQNIYITGDVSELGNWTPANGVALSSANYPTWSATIALPADTTIQYKYVNIDGSTVIWEDAISNREITTPASGTYTEKDTWDES

SEQ ID NO: 173 - protein, 565 aa, Thamnidium elegans
VPLSVLDKRNGVTTLSKRAAAADWKSRSIYQLVTDRFGRSDGSTSACGDLSNYCGGDYKGIQNQLDYIAGMGFDAIWISPIPENTDGGYHGYWAKDFEKLNTNFGSADDLKALVTAAHGKGMYVMLDVVANHAGPASGGDYSGFTFSSASNYHPQCTIDYDNQTSVEQCWVADDLPDINTEDDTIVSKLHSIVSDWVTTYDFDGIRIDTVKHIRKDFWSGYEEAAGVFATGEVFDGDAAYVGPYQDQLSSLINYPLYYAIRDVFSAGSGFSRISDMLSTIKSNFKDPSVLTTFVDNQDNARFLSVKSDMSLYKNALAFTILTEGIPVVYYGTEQGFKGGDDPKNREVLWTSNYDTSSDLYKFIKIVNNDVRQKSDKTVTLDVDVGTNTYAFTHGKNLIVVNNYGSGSTESVTVKVGDSVADGTKLVDAVSNITATVSGGSITFSLKDGLPALFVPSSGATSPGGSSGSVEVTFDVYATTVYGQNIYITGDVSELGNWTPANGVALSSANYPTWSATIALPADTTIQYKYVNIDGSTVIWEDAISNREITTPASGTYTEKDTWDES

SEQ ID NO: 174 - protein, 574 aa, Meripilus giganteus
RPTVFDAGADAHSLHARAPSGSKDVIIQMFEWNWDSVAAECTNFIGPAGYGFVQVSPPQETIQGAQWWTDYQPVSYTLTGKRGDRSQFANMITTCHAAGVGVIVDTIWNHMAGVDSGTGTAGSSFTHYNYPGIYQNQDFHHCGLEPGDDIVNYDNAVEVQTCELVNLADLATDTEYVRGRLAQYGNDLLSLGADGLRLDASKHIPVGDIANILSRLSRSVYITQEVIFGAGEPITPNQYTGNGDVQEFRYTSALKDAFLSSGISNLQDFENRGWVPGSGANVFVVNHDTERNGASLNNNSPSNTYVTATIFSLAHPYGTPTILSSYDGFTNTDAGAPNNNVGTCSTSGGANGWLCQHRWTAIAGMVGFRNNVGSAALNNWQAPQSQQIAFGRGALGFVAINNADSAWSTTFTTSLPDGSYCDVISGKASGSSCTGSSFTVSGGKLTATVPARSAIAVHTGQKGSGGGATSPGGSSGSVEVTFDVYATTVYGQNIYITGDVSELGNWTPANGVALSSANYPTWSATIALPADTTIQYKYVNIDGSTVIWEDAISNREITTPASGTYTEKDTWDES

SEQ ID NO: 175 - protein, 671 aa, Chaetomium megalocarpum
LYINGSVTAPCDSPIYCQGEILKAIELARPFSDSKTFVDMPTIKPVDEVIAAFSRLSQPLSNNSELTAFLAENFAPAGGELEEVPISELETDPSFLNKLEDVDIKEFVGKVIDIWPDLTRRYAGPGNCSQCANSFIPVNRTFVVAGGRFREPYYWDSYWILEGLLRTGGAFTQISKNMIENFLDFVETIGFVPNGARIYYLNRSQPPLLTLMVKTYVDYTNDTSILERALPLLVKEYEFWTNNRTVSITATDGKEYTLNRYSVNNNQPRPESYREDYVTANNASYYAQSGIIYPVKTPLNETEKAELYSNLASGAESGWDYTARWLKTPDDAARDVYFPLRSLNVRSIVSVDLNSILYQNEVIISEYLEQAGNSSEAKRFADAAEQRSEAMYALMWNATHWSYFDYNLTDNSQRVFVPADADTAPSDQTAAPPGQQVLFDIAQLYPFWTGAAPASLKANPLAVQNAYARVARMLDTKAGAIAATNLRTGQQWDQPNVWPPLQHILMKGLLNTPATFGTEDPAYAHTQDLALRLAQRYLDSTFCTWYATGGSTSATPQLQGAAPGATGTMFEKYADDATNVAGGGGEYEVVEGFGWTNGVLIWAADVFGDRLVRPDCGNITAAHTHSSEKRTVAGASRPDAGASGVRRERRAVELDPWDAAWTKMFGRSKLR

SEQ ID NO: 176 - protein, 662 aa, Lecanicillium psalliotae
LYQNGSVIAPCDSPIYCHGDILKEVELARPFTDSKTFVDMPAKKPLAEIQAAFDKLEKPLSNNTALNEFLSTYFEDAGGELKAVSKDKLKTDAKFVDKLNDTVIKEFVNKVIDIWPDLTREYAGSATNCTNCPNSFIPVNRTFVVAGGRFREPYYWDSYWIVEGLLRTGGAFVDITKNTIENFLDLIEQFGFIPNGARLYYLNRSQPPLLSQMVKNYISYTNDTDILKRALPILVKEHEFFMNNRSVEITVENKTYTLNRYAVSNTQPRPESFREDYNTVNNNSYYAASGIIYPVKTPLNESEQATLYANLASGAESGLDYTTAKWSTNPRDSMEDIYFPLRSLNIMNIVPVDLNSILYGNEKAISEFYNITGNSSEADSWSKKAAERQEAIQAVFWNETLYSYFDYNRTSSSQHIYIPSDDDTQSFENATAPAGMQEVFTVTQFYPFWMGAAPDYIRNNPHAVKTAYSRIAKYLELKPGGIPSSNLRSGQQWDQPSVWPPLMHVLMKGLVNTPATFGKEDPAYKDVHKLALTLGQRYLDSTFCTWYATGGSTSETPQLSGLSDSDVGIMFEKYDDTSINHAGGGGEYEVVEGFGWSNGVLMWVADTFGNELKRPDCGNITAANVHPGKRSVSAVELSSRDAQRVKKFGRRAEGRMKVPGVL

SEQ ID NO: 177 - protein, 637 aa, Doratomyces sp.
LYTNGSIIAPCDSPIYCHGDILHQVQLAHPFPDSKTFVDMPAIKSVDEIQAAFDKLDKPLKNDTALQNFLAENFAEAGHELAEVDPSELSTDPRFLDKVSDTVIHEFTQKVIDIWPDLTRSYSPSGAGSDCPDCPNSFLPVNRTFVVAGGRFREPYYWDSYWIVEGLLRTGGDFLGVSRNIIENFLDFVDDFGFVPNGARRYYLNRSQPPLLSLMVKSYVEQTNDTEILDRAVPLLIKEYEFWTKNRTVEVPFGNETITLNQYNVDNTQPRPESYREDYITATNASYYSASGEVYEEVEKLNETQRATVYRNLATGAESGWDYTSRWMARPRDAVEDVYFPLRSLNIIEIVPVDLNSILYANELAIAEFVRLAGADDCEEEAAAWEALAEKRSADMHRLMWNDTLHSYFDYNLTSSSQNVYVPADNDTAPFERPGGTPEGSQVFFSAAQFYPFWTGAAPSSLRDDPAAVQLAYSRVASYLDLRAGGIPATNLRTGQQWDQPSVWPPLMHILTSGLLNTSPASASDDDDPSYAPTRDLALSLAQRYLDSTFCTWYATGGSTSETPQLDGFTDEDKGAMFEKYDDSATNVAGGGGEYEVVEGFGWTNGVLIWMVDTFGDELSRPDCGDIEAANAHPARK

SEQ ID NO: 178 - protein, 601 aa, Mucor moelleri
IQNHTSFSCDSPIYCEGDILHTVQLAKIFSDSKTFVDMPTSKSESQVIEAFKAIGGRNATIAQVQQFLNENFLTAGTEVKRLTNITIPELNWIDNITDPDYRGWISKLNQAWSNLTFTFDTSVLCQDCATSTLPVSRPFVVPGGRFREFYYWDSFFVIKGLLLSDQVELAKNMILNFFDFIDTYGFIPNGARIYYLNRSQPPFLTQMVEAFWEKTSDKEFMTNALPFLDKEYNFWMTNNSISVPDPKNPSKKYKMNHYVTLNTSPRPESYVEDYNTVNNGTDYSQAVKLQLYADIAAGAETGWDYSSRWTRQKHPAPNQTEGYEMLRSINTANIVPIDLNSLLWNTETMLAEWHDRFGEKSKSKKKSAYYQTQAKKRLDAMEKLMWNPTDYTYYDYNLTSSSQNLEFTPANLFPIWLGALPNKVMKNKTELARVFDETENALRKYPGILTTSYYNTTMQWDWPNGWPPLSYVAMEGMNKVEESLNGKKGSKQDGKTYTTSRGTSLARLSFTLAERYAASAYCGWYKTGGSIPGILNKIDGVADDGHMFEKFDVNTIGISGSQGEYVSQTGFGWTNGIALWIFDTYANLTAPDCNQTITLNI

SEQ ID NO: 179 - protein, 650 aa, Phialophora cyclaminis
LYINGSVIAPCDSPIYCHGELLKAIELARPFSDSKTFVDMPTRKPVDEVVAAFEKLSKPVVNDTKLGEFLQANFLPAGGDLSDFPPGSLETDPKFLDNINDTVIREFTEAVIDIWPDLTRRYVGASNCTGCANSFIPVNRTFVVAGGRFREPYYWDSYWIIEGLLRTGGNFVQISKNIIENFLDFVETIGFVPNGARIYYLNRSQPPLLTAMVKAYLEHTNDTKILDRAVPLLIKEYNFWITNRSVTLTGPDGNEYTLQRYSVNNNQPRPESYREDYNTANNKSYYSTSGIIYPENVSLNDSEKKELYANLATGAESGWDYGTRWLSRPADALRDVYFPLRYVKTRDLVPVDLNAILYQNEASISSFLYIQGNDTGAAHFAKLAAARQKAMTAVLWNATLFSYFDYNMTSSSHFSFIPVDDDATSIETATAPRGFQQIFHVAQLYPFWTGAAPASLRENPLAVQRAFSRVSQMLEEKAGSIPATNFYTGQQWDEPNVWPPLQHIIMEGLRNTPATFGEDDPIYQGVQDLALRVAQRYLDSTFCTWYATGGSTSLTPKLAGLTDNAKGIMFEKYGDNSTNVAGGGGEYEVVEGFGWTNGVLIWAVDTFGNKLKRPDCGDIQPAHVEARGLQRRAVELDKWDAQWVKRFGAK

SEQ ID NO: 180 - protein, 654 aa, Thielavia arenaria
LYINGSVIAPCDSPLYCHGDILKAIELARPFQDSKTFVDMPTIRPVEEVIAAFNRLSQPLSNNSELNAFLQANFAPAGGELEEVPESELSTNPVFLDKLNDTVIKEFVAKVIDIWPDLTRRYAGPGNCSECADSFIPVNRTFVIAGGRFREPYYWDSFWILEGLLRTGGAFTEISKNMIENFLDFVETIGHIPNGARIYYLNRSQPPLLAGMVKNYVDYTNDTSILERALPLLIKEYEFWTNNRTVQVTASDGKTYTLHRYNVNNNQPRPESYREDWITANNASYYAASGIIYPVKTPLNESEKAALYSNLASGAESGWDYGTRFLMRPEDAARDIYFPLRHLNVRDMVTVDLNAILYQNEVIISEYLEQAGNNTEAERFASAARQRSEAMYALMWNETLWSYFDYNLTSNSQYTFIPADVNATAAEKANAPEGQKVIFHIAQLYPFWTGAAPDQLKNNPLAVQKAYSRVAEMLDIKPGAIPATNFITGQQWDQPNVWPPLMHVLMAGLLNTPPTFGEDDPAYQAVQALALRLGQRYLDSTFCTWYATGGETSQTPRLQGVSPDATGTMFEKYADNAINVAGGGGEYEVVEGFGWTNGVLIWAADVFANGLKRPDCGNITAAHTHNGAKRAVELHPRDAAWTKKFGKRALKKRA

SEQ ID NO: 181 - protein, 661 aa, Thielavia antarctica
LYVNGSVTAPCDSPLYCQGEILKAIELARPFADSKTFVDMPTLRPLDDVIAAFRKLSQPLSNSSELNAFLAANFAPAGGELEEVPKSELRTKPAFLDKVEDVVIKEFVGKVIDIWPDLTRRYAGPGNCTECANSFIPVNRTFVVAGGRFREPYYWDSYWILEGLLRTGGDFTKISRNIIENFLDFVDTIGFVPNGARIYYLNRSQPPVLTLMVKTYVDYTNDTSILERALPLLIKEHEFWTTNRSVSVEVDGKTHTLNRYFVNNNQPRPESYREDWITANNASYYAASGIIYPVKTPLNGTQQAELYANLASGAESGWDYTSRWLKTPSDAARDVYFPLRSLNVINTIPVDLNSILYQNEVIISEYLEQAGNKSGAEKFSDAARQRSEAMYALMWNATNWSYFDYNLTSSGQNTHFPADADATAAETTSSPAGTQLLFSVSQLYPFWTGAAPQQLKSNPLAVTQAYARVAAMLDAKAGAIPATNLLTGQQWDEPNVWPPLQHVLMQGLLNTPATFGADDPAYQATQALALRLAQRYLDSTFCTWYATGGSTSATPRLAGVSAGAEGSMFEKYGDDSTNVAGGGGEYEVVEGFGWTNGVLIWAADVFAGKLQRPECGDIEAAQTHGGAARRGLGMERRAIELDPWDARWTKAFGKRALRRRA

SEQ ID NO: 182 - protein, 667 aa, Chaetomium sp.
LYINGSVTAPCDSPLYCQGEILKAIELARPFSDSKTFVDMPTIKPVDDVIAAFSRLSQPLSNNSELNAFLAENFAPAGGELEEVPESELETDPAFLDKLEDTTIKEFVTKVIDIWPDLTRRYAGPGNCSKCANSFIPVNRTFVVAGGRFREPYYWDSYWILEGLLRTGGAFTEISKNIIENFLDFVDTIGFIPNGARIYYLNRSQPPLLTLMVKTYVDYTNDTSILERALPLLIKEHEFWTNNRSVAITAADGKKYTLQRYYVNNNQPRPESFREDYITANNASYYAASGIIYPVKTPLNETEKAELYSNLASGAEAGWDYTARWLKTPNDAARDVYFPLRSLNVIGMVPVDLNSILYQNEVIIAEYLQQAGNSSEARRFATAAEKRSEAMYALMWNSTHWSYFDYNLTSNSQRIFVPTDADADPVDQTNAPPGHQVLFDIAQLYPFWTGAAPASLKNNPLAVQLAYARVAHMLDTKAGAIPGTNFRTGQQWDQPNVWPPLQHVLMKGLLNTPPTFGEADPAYQEVQRLALRLAQRYLDSTFCTWYATGGSTSDMPQLQGVNPGATGTMFEKYADNATNVAGGGGEYEVVEGFGWTNGVLIWAADVFGEGLTRPDCGNITAAHTHSGAKRGLDGGEGGAGGLWGRRAVELDPWDARWTKMFGRRKRE

SEQ ID NO: 183 - protein, 671 aa, Chaetomium nigricolor
LYINGSVTAPCDSPLYCQGEILRAIELARPFSDSKTFVDMPTIKPLEEVIAAFNQLTQPLSNNSELNTFLAENFAPAGGELEEVPKDELNTDPGFLDKLNDTTIREFVAKVIDIWPDLTRRYAGGGNCSECANSFIPVNRTFVVAGGRFREPYYWDSYWILEGLLRTGGAFIEISKNIIENFLDFVETIGFIPNGARIYYLNRSQPPLLTLMVKTYVDYTNDTSILERALPLLIKEHEFWVNNRSVEITAANGQTYTLNRYHVNNNQPRPESYREDYITANNGSYYAASGIIYPVRTPLNETEKAELYANLASGAESGWDYTARWLKTPNDAANDVYFPLRSLNVRGLVPVDLNSILYQNEVIIAEYLQQAGNLSLAQRFAEAAEQRSEAMYALMWNATYWSYFDYNLTSNSQRIFVPLDADSRTIETVGAPPGHQVLFDIAQLYPFWTGAAPANLKNNPLAVQQAYSRVASMLDAKAGAIPATNFRTGQQWDQPNVWPPLQHILMQGLLNTPPTFGDSDPAYQHVRDLALRLAQRYLDSTFCTWYATGGSTSDMPQLQGVSPDATGTMFEKYADNATNVAGGGGEYEVVEGFGWTNGVLIWAADVFGDALKRPDCGDIEAAHTHQAKKRDVEGLERRAVELDPWDAAWTKMFGRSKLRKRGAGGQKRWVS

SEQ ID NO: 184 - protein, 666 aa, Chaetomium jodhpurense
LYFNGSVIAPCDSPLYCQGEILKAIELARPFSDSKTFVDMPTIKPVDEVIAAFNRLSQPLTNNSELNAFLAENFAPAGGELEEVPKDELNTDPKFLDKLEDATIKEFVAKVIDIWPDLTRRYAGASNCSECANSFIPVNRTFVIAGGRFREPYYWDSYWILEGLLRTGGAYTQISRNMLENFLDFVETIGFIPNGARIYYLNRSQPPLLAMMIKNYVDYTNDTSILDRALPLLIKEHEFWINNRSVSITAADGKQYTLHRYNVNNNQPRPESYREDYITANNASYYAASGIIYPVKTPLNESEKAELYANLATGAESGWDYTARWLKTPNDAAKDVYFPLRSLNVRGMVSVDLNSILYQNEVIIAEYLERAGNISEAERFAAMAQQRSEAMYALMWNSTHWSYFDYNLTSNSQRIFVPLDDDSSTAEQANSPPGHQVLFDIAQLYPFWTGAAPESLKSNPLAVQLAYSRVARMLDTKAGAIPATNFRTGQQWDQPNVWPPLQHVLMAGLLNTPPTFGESDPAYQNVRALALRLAQRYLDSTFCTWYATGGETSQTPRLQGVSPDATGTMFEKYADNATNVAGGGGEYEVVEGFGWTNGVLIWAADVFADGLKKPDCGNITAAHTHSAKRGLERRAVELDPWDAAWTKMFGRSKLRKREEGRKRWLS

SEQ ID NO: 185 - protein, 670 aa, Chaetomium piluliferum
LYINGSVIAPCDSPLYCHGEILKAIELARPFSDSKTFVDMPTIKPLDEVIAAFSQLSQPLSNNSELNAFLAENFAPAGGELEEVSKDELQTDPTFLDKLDDTTIKEFVSKVIDIWPELTRRYVGSSDCSGCANSFIPINRTFVVAGGRFREPYYWDSYWILEGLLRTGGAFVDISRNIIENFLDFVETIGFVPNGARIYYLNRSQPPLLTLMVKTYVDYTNDTSILERALPLLVKEHEFWTTNRSVSITANGKEYTLNRYSVNNNQPRPESYREDYITASNESYYAESGIIYPVRTPLNETEKAELYSNLASGAESGWDYTSRWLKTPNDAANDVYFPLRSLNVLGLVPVDLNSILYQNEVILAEYFEQAGNSSEAERFAAAAEQRSEAMYDLMWNATHWSYFDYNLTSSSQRIFVPLDDGASTQEQSTSPPGYQVLFDVAQLYPFWTGAAPAALKSNPLAVQHAYSRVADMLNTKAGAIPATNFRTGQQWDQPNVWPPLQHIIMQGLLNTPPTFGESDPAYENTQSLALRLAQRYLDSTFCTWYATGGSTSDMPPLQGVSAGATGTMFEKYADDATNVAGGGGEYEVVEGFGWTNGVLIWAADVFGDALKRPDCGNITAASTHEGATKRDLRGLGRRAVELDPWDAAWTKMFGRAKLRKREQGRETWVN

SEQ ID NO: 186 - protein, 674 aa, Myceliophthora hinnulea
LYINGSVTAPCDSPIYCHGELLKGVELAHPFVDSKTFVDMPTLKPVDEVLAAFSKLRQPLSNNSELNNFLAEYFAPAGHELEEVPDSELQTDPKFLDKLEDRTIKEFVSKVIDIWPDLTRRYAGPGDCSDCANSFIPVNRTFVVAGGRFREPYYWDSYWILEGLLRTGGAFTQISKNIIENFLDFIDTIGFIPNGARIYYLNRSQPPLLTRMVKSYVDYTNDTSILERALPLLIKEHDFFTNNRSVSVTASNGKTYTLHRYHVENNQPRPESYREDYITANNGSYYAASGIIYPVKTPLNETEKAVLYSNLASGAESGWDYTARWLRVPDDAARDVYFPLRSLNVREIVPVDLNSILYENEVIIAGYLEKAGNSSEAKRFASAAKQRSEAMYNLMWNATHWSYFDYNLTSNAQNIFIPADEDTAPFDRTAAPPGKQVLFHIAQLYPFWTGAAPAHLKSNPLAVQKAYARVSRMLDSKKGAIAATNYRTGQQWDQPNVWPPLQHVLMQGLLNTPATFGESDPAYQGVQKLALRLAQRYLDSTFCTWYATGGSTSDFPQLQGVSPDATGIMFEKYADSAINVAGSGGEYEVVEGFGWTNGVLIWAADVFGNKLKRPDCGNITAAHTHSEAKRSLGDGGLARRAVELDPWDAAWTKMFGRSKLRRREAEDVRKRWSS

SEQ ID NO: 187 - protein, 659 aa, Chloridium virescens
LYINGSVIAPCDSPLYCQGDILKAIQLAQPFSDSKTFVDMPTTQPVDQVIAAFNQLPQPVSNNSGLQNFLSTYFAPAGGELTEVPKDQLQTNPMFLNKLNDTVIREFVTAVIDIWPDLTRTYTGASNCTGCSDSFIPVNRTFVVAGGRFREPYYWDSFWILQGLLRTGGAFTQISKNIIENFLDLVDQFGFVPNGARVYYLNRSQPPVLSEMVRTYVAYTNDTSILARAIPTLIKEHNFWMQNRTVNITGADGNTYTLNQYHVENTQPRPESYTEDYITANNHSYYATSGIIYPETKPLNDSEIANLYANLASGAESGWDYGSRYLARPNDAAQDVYFPLRSLNVLNIVPLDLNSLLYQSEQNIALFLQATGNSSEAEQWTSLAAQRQTAIHALMWNETLWSYFDYNLTSNGQNIYVPADKDATPADTASAPPGYQVLFDVAQFYPFWTGAATDELRRNPLAVRQAFTRVDAYLTAKAGGIPATNLMTGQQWDQPNVWPPLMHVLMQSLLDTPATFGAADPSYAALQGLALRLAQRYLDMTFCTWYATGGSTSQTPKLQGLGPDAVGTMFEKYADNATNIAGSGGEYTVVEGFGWTNGVLIWAADTFGAQLTRPNCGNITAAHVTPGKRSVGLGRRAVELHESDARWVKMFGSRAWRNA

SEQ ID NO: 188 - protein, 662 aa, Gelasinospora cratophora
LYVNGSVTAPCDSPIYCYGELLHQVELARPFSDSKTFVDMPTIKPVDEVLEAFSKLTLPLSNNSELHEFLNTYFGPAGGELEAVPTDQLHVSPTFLDNVSDDVVKQFVNSVINIWPDLTRKYVGAGEICTGCANSFIPVNRTFVVAGGRFREPYYWDSFWILEGLLRTGGAFTEISKNTIENFLDLVEQIGFVPNGARLYYLNRSQPPLLTQMVRIYVEHTNDTSILERAVPILKKEWEWWITNRTVEVTADGKTYSLQRYHVDNNQPRPESYSEDYITANNNSYYATSGIIYPETTPLNDTQKAQLYANLASGAESGWDYSTRWLKNPNDAARDVYFPLRSLNVLEIVPVDLNSILYQNEVTIGKFLAQQGNKDEAEEWAKKAEQRSEAMYKLMWNSTLWSYFDYNLTSSSQNIYVPADPQVFPFEKPSGTPEGYQVLFSINQMFPFWTGAAPDQLKANPLAVKLTFDRVKNYLDNKAGGIPATNFVTGQQWDEPNVWPPLMHVLMDGLLNTPATFGEDDPAYQETQNLALRLAQRYVDSTFCTWWATGGSTSETPKLQGLGSDAKGIMFEKYADNSTNVAGGGGEYEVVEGFGWTNGVLIWAADKFGDKLKRPNCGDLTPANVGKRAVELDAFDAKFTKKFARKGKLEKLKAKFKRRAAI

SEQ ID NO: 189 - protein, 543 aa, Acidobacteriaceae bacterium
QTTTTSAGLHDTLAYIKRTWHTLERSNKTLLKSADDVKVGQAGTLTLYVSQDVKPQAVNASLRRELPPADKKRIVVRQLPEHPEAVEPAGLLYLPYPYVVPGGRFNEMYGWDSYFILLGLVHDDELALAKNMTDNFIYEIEHYGMILNANRTYYLTRSQPPFLTQMILEVYRRTGDGKWLASTLPAIEKYYAYWMREPHLTPETGLSRYWGGADTPAPEVVHGEKDAAGHNQYDRVREYYRTHNVTAYDVSQYYDKATDRLKPLFYIADRAMRESGFDPSSRYGPFSADIIHYDPVCLNSLLYRMESDTATILKQLNRTSEARVWEKRATQRAELVNRLMWNEEKGLYFDYDFITRRQSNYHFVTTFYPLWAGIASRQQADRVRKNLSIFERAGGLQTSDYISGSQWDAPFGWAPLQIMTVEGLRRYGFNEDADRISRKFINMVVRDFEEHGTIKEKYDVVIGKSDLAAGLKFGYTSNEAGFGWTNAAVVLFIEELAGERPLAASLDRESMPMLRQRHLSPQPSVWPPFSPQAPQYRRRDPYR

SEQ ID NO: 190 - protein, 532 aa, Acidobacterium capsulatum
GARSSLSPHAVAGPQPIDAYIHTAWSTLTRSMSDCKSVADPKLKSTPVLYLPRDLAVPANVAAMQKQCHVRVLRLPIVITHFDQIRESQIATPGLLYLPHPYVVPGGRFNEMYGWDSFFILKGLLDDHHIALARGIVENFFFEIAHYGGILNANRTYYFTRSQPPFLSSMIRAIYAAEVAEGHTQAAHAWLVEAYPYAVRDHALWMSPIHQAGNTGLARYFDTGQGPVPEMADDSTYYQDVIRWLLAHPGLHTGYLMHGSPHLDAAARERLAQLSCDPTLSKVCARAHVHGYWLTRSFYKGDRAMRESGFDTTFRFGPFSGSTQHFAPVGLNALLYKYERDLAWMAAQLGKPGEAAKWNSEAETRRAEMNHYLWNAQKKMYFDYNFETHRQSSYAFITTFYPLWAGAADKAQQQGVIASLPLFEHPGGLAISNHDSGVQWDLPYGWAPTEWMAVQGLLRADDQHDARRIASEFNRTVRTTYQHDHAIYEKYDVVNRSNDFRVTAGYTQNVVGFGWTNAVYLEFQSLLAHPGQ

SEQ ID NO: 191 - protein, 568 aa, Acidovorax wautersii
AAAVSSGLRISERHPAYSTNPARVQVPGAPGAPPSDHCTPADRYQELFVAVQSQQIFEDSKTFVDCGPIGEPEDILAAYRAEHAQPDFDLARFVAQHFTAPQVAANDYVGAPGMALAEHIDALWPVLTRKPEDHPVRGSALPLAHPYVVPGGRFAELYYWDSYFTMLGLAATGRSELVQCMTDNFARLIDAFGFVPNGTRTYYLSRSQPPLFAAMAELGALVGGPPVSHYLPQLLQEHAWWMDGLHVLHPGEARRRVVALPGGEILNRYWDDRDTPREESWREDIETASAVDRPSADVYRDLRAAAESGWDFSTRWLRAPDAANPASLHLSQICTTDLLPVDLNAFLYRMEVSIAKASQSAGDRATATHFHDLAAHRREAVNRLMWNEAEGAYFDYDWRRGELRGCLTAATVVPLYAGMATEAQAAAVARAVRTHLLAAGGLATTVCSSDQQWDRPNGWAPLQWMAVRGLERYGHKDLALEVRQRWIETVRSVYQREGKLVEKYAVGNGDGAPLCGGGGGEYPLQDGFGWTNGVVQCWLDPRYDTYAAAQTVYYGPTDDGTADSLPEA

SEQ ID NO: 192 - protein, 529 aa, Xanthomonas arboricola
APMDTPVVNAPAATPPTPDLAYPELFQAVQSGELFDDQKHFVDFLPLRDPALINADYLAQHDHPGFDLRKFVDANFEESPPVQTDAIRQDTALREHIDELWPKLVRSQTHVPPYSSLLALPHPYVVPGGRFREVYYWDSYFTMLGLVKSGETTLSRQMLDNFAYLIDTYGHIPNGNRSYYLSRSQPPFFSYMVELQAGVEGEAVYQRYLPQLRKEYAYWMQGSEDLQPGQAARHVVRLADGSLLNRYWDERDTPRPEAWLHDTRTAAEAGDRPAAEVYRDLRAGAESGWDYTSRWLADGQNLRTIRTTAIVPIDLNSLLYHLERTLAQACAQPGAECAQDYAALALRRKQAIDAHLWNAAGYYADYDWQTRKLSDQVTAAALYPLFTGLATDAHAKRTASTVRARLLRPGGLATTAVKTGQQWDEPNGWAPLQWVAVDGLRRYGEDALARTIGERFLTQVQALFAREHKLVEKYGLEADAAGGGGGEYALQDGFGWTNGVTLMLLNLYPDTATKPAPAKRARKPEAAAR

SEQ ID NO: 193 - protein, 540 aa, Kosakonia sacchari
AEAQNTPQPPDILLGPLFSDVQTAKLFPDQKTFADAVPKGDPLMILADYRMQRMQTSFDLRHFVDVNFTLPKEGEKYVPPEGQNLREHIDGLWPVLTRTTDSAGKWDSLLPLPKPYVVPGGRFREVYYWDSYFTMLGLAESGHWDKIEDMVTNFAHEIDTWGHIPNGNRSYYLSRSQPPFFSLMVELLATHDGDEALKTWLPQMEKEYQYWMEGADTLQPGQANKRVVKLSDGSVLNRYWDDRDTPRPESWLDDVTTAKNNPNRPATEIYRDLRSAAASGWDFSSRWMDDPNQLGTIRTTSIVPVDLNALMFKMEKMLARGYQAAGDSAKASQYDALANARQKGIEANLWNEKEGWYADYDLKTKKVRNQLTAAALYPLFVNAAAKDRADKVASAAKERLLKPGGIATTTVNSGQQWDAPNGWAPLQWVATAGLQNYDQQKLAMEVSWRFLTNVQHTYDREKKLVEKYDVSTTGTGGGGGEYPLQDGFGWTNGVTLKMLDQICPKEKPCDSVPQTQPAQQPAAKVEPTSQPSKQQQAVAQ

SEQ ID NO: 194 - protein, 532 aa, Enterobacter sp.
DEQPAFQKNSPDILLGPLFNDVQSAKLFPDQKTFADAVPKSDPLMILADYRMQHTQSSFDLRHFVEMNFTLPAEGEKYVPPAGQSLREHIDDLWPVLTRTTDKASNKWDSLLPLPKPYVVPGGRFREVYYWDSYFTMLGLAESGHWDKISDMVDNFAWEIDTFGHIPNGNRSYYLSRSQPPFFSMMVELLATHDSDALKKYRPQMEKEYAYWMEGVDSLQPGQANQRVVKLDDGSVLNRYWDDRDTPRPESWLDDVNTAKNNPNRPATEIYRDLRSAAASGWDFSSRWMDDPQKLGTIRTTSIVPVDLNALMFKMEKLLARASQEAGDSAAASKYEALATARQKAIENHLWNDKEGWYADYDLKSKKVRNQLTAAALFPLYVKAASQERADKVAAATSARLLKPGGITTTTINSGQQWDAPNGWAPLQWVATEGLQNYGQNKVAMDVTWRFLKNVQHTYDREKKLVEKYDVSTTGTGGGGGEYPLQDGFGWSNGVTLKMLDLVCPKEKPCDSVPENQPAANDEAAPVKASAQ

SEQ ID NO: 195 - protein, 720 aa, Saitozyma flava
QNPASSSSFSPTPVTTMVPSPTAALNATVPGQGVYPPLQAWCNNGGNDTFCPGVLLQDVQLSGIFPDSKTFVDKPTRGTLNETLRTFASLGNNLTVGQIEGFVNNSFKGEGLELSQVALEGFNPNPAFLDTISDPIYQGWMSVVNSYWTLLIRETNRSALCNGDCESSLIPLNNTIVVPGGRYREIYYWDSYWILIGLLESELTAYATDLISNFMDFIQTYGFIPNGGRKYYLNRSQPPVFTQMLNTYVQRTGNTSILARGLPLAHQELVWWENNRVISVTSPYSNITRRVAHFAVNNTAPRPEGYVEDYETAFGASPALNETARGQLYSDLAAGAESGWDYSSRWCKQPVINLTDNFPALRTINTAKIIPVDLNSLLAGDHTLLANLYELYGNSSNANTSVTSNSSQLVPYHRQLAKNYSDAVLDLHWDAQKAWFYDFNLTANARADIYHPGGTFALWQNITPPAVASNETYALEVVSGARFLLGKYTSIPSVSTLIETGLNWDFPNSWPPHVYSSIKAFETLGRAFPNASVLSNISIPFSDVQKNQLGLDESAIPAQPASTIGNSTSQIAEAQGKPWPQALSIEYANRYMQAAFCSWYSTGGSIDGLLTQLPLSELNMTGTFQAGTTGVMFEKFNVTDLDAAGGGGEYKVQIGFGWTNGVALWLGANFGQYLPQPTCPLIPIIEVQNGMNSSVYQNGTMTNSTKTQSYIFQGHRIPRK

SEQ ID NO: 196 - protein, 723 aa, Phaeotremella skinneri
QTPTSSSSSSFSATPVSTSVPSPTVPLNSSVIGQGLYPPAQAWCNGGMNDTFCPGVLLQDVELSGIFADSKTFPDKPTVGTLNSTLQAFAALPANVTVGEIETFVNQYFKGEGLELEQVAIEGFVANPAILNNITDPVFKGWVSTVNGYWQLLIRQTNESSLCNETSCASSLIPLNHTIVVPGGRYREIYYWDSFWILQGLLKSELYTYSWDLLQNFMDLIETYGFLPNGGRKYYLNRSQPPVFIQMLDAYIKVTGNSSILARALPIATTELAWWSSNRTIPVTSPYTGITHLVAHYAVTNSAPRPEGYVEDFTTAMGASPALNDSARAELYSELASGAETGWDYSSRWCRQPLLNLTDNNPALRTLNVKAIIPVDLNSLLAGDHALLANLYDLYSNSSSSNSTSNSSSISNSSSQAAYHRQAAQNLTAAILDLHWSPSKSFFYDFNTSSNSQSDIYTPASLFPLWQNITPPALVGNETAALQLVSGVRYLLGKYAGIPSVATLLATGLNWDFPNSWPPHVYTSIKAFQTLYRVNPNATVLSNLTLSFAQVQAGQLGLSETGFQIQPASTVGNTSLETAEAKGKPWPVALGIEYANRYMQSAFCSWYSTGGEISGVLTQLPLSDLNSTGTFTAGQTGVMFEKFNVTDPDAAGGGGEYTVQTGFGWTNGVVLWVAGEFGSLLPAPTCPLIPIIEISGSSNSSIYANGTVTNSTALYRGYKIPRK

SEQ ID NO: 197 - protein, 663 aa, Trichoderma asperellum
LYTNGSVIAPCDSPIYCHGDILQDIQLAHPFSDSKTFVDMPAKRPLREIQSAFNNLSKPLTNDSSLQVFLETYFADAGGELVEVPRSSLTTNPAFLNKINDTVIREFVTKVIDIWPDLTRRYSGAVGNCSTCPNSFIPVNRTFVVAGGRFREPYYWDSYWIIEGLLRTGGAFVGIAKNTIENFLDFIDRFGFIPNGARLYYLNRSQPPLLSQMVRIYIEHTNDTSILKRALPLLVKEHDFWIRNRTISVNIANKTYTLQQYAVQNTQPRPESFLEDYVTANNRSYYATSGIIYPENKHLNSTEMADLYANLATGAESGNDYTSRWLANPSDAINDVYFPLRSLNNKEIVPVDLNSILYGNELTISQFYNRTGDATAARAWAERAANRSAAIQAVFWNETLFSYFDYNLTSSSQYVYVPADKDTISLDRQTAPSGKQVFFHVGQFYPFWTGAAPDYVKNNPYAVTRAYDRVTGYLDAQPGGIPASNVQTGQQWDQPNVWPPHMHILMQGLNNVPATFTAQDPSYQDIQNLSLRLGQRYLDFTFCTWLATGGSTSETPKLHGLSDQDVGIMFEKYDDNSTNAAGGGGEYEVVEGFGWTNGVLLWTADTFGNKLKRPQCGNITAGHPAPASSSSKRSAVQLDAWDARRVKKFGKRTEGRVKRPFLF

SEQ ID NO: 198 - protein, 674 aa, Corynascus sepedonium
LYINGSVTAPCDSPIYCQGELLKAVELARPFVDSKTFVDMPTIKPVDEVLAAFSKLSLPLSNNSELNAFLYENFAQAGHELEEVPDSELETDAKFLDKLEDRTIKEFVGKVIDIWPDLTRRYAGPSNCTECANSFIPVNRTFVVAGGRFREGYYWDSYWIVEGLLRTGGAFTHISKNIIENFLDFVDTIGFIPNGARIYYLNRSQPPLLTLMVKSYVDYTNDTSILDRALPLLIKEHEFFMNNRTVSITGSNGKEYTLNRYHVENNQPRPESFREDYITANNGSYYASSGIIYPVKTPLNETEKAALYSNLATGAESGWDYTSRWLGVPSDAARDVYFPLRSLNVRDIVPVDLNSILYQNEVIIAEYLEKAGNSSAAKRFATAAEQRSEAMYSLMWNATHWSYFDYNLTDNTQHIFVPADEDTAPQDRIEAPPGQQVFFHIAQLYPFWTGAAPASLKANPLAVQQAYARVARMLDIKKGAIPATNYRTGQQWDQPNVWPPLQHILMKGLLNTPATFGKSDPAYQSVQNLALRLAQRYLDSTFCTWYATGGSTSDFPQLEGVTPGATGVMFEKYADNATNVAGTGGEYEVVEGFGWTNGVLIWAADVFGNKLKRPDCGNITAAHTHSSAKRGLEENKLPRRAVELDPWDAAWTKMFGRSKLRRREAEDVRKRWMS

SEQ ID NO: 199 - protein, 674 aa, Myceliophthora thermophila
LYINGSVTAPCDSPIYCHGELLKGVELAHPFVDSKTFVDMPTLKPVDEVLAAFSKLRQPLSNNSELNNFLAEYFAPAGHELEEVPKGELQIDPKFLNKLEDRTIKEFVSKVIDIWPDLTRRYAGPGDCSGCANSFIPVNRTFVVAGGRFREPYYWDSYWILEGLLRTGGAFTQISKNIIENFLDFIDTIGFIPNGARIYYLNRSQPPLLTRMVKSYVDYTNDTSILERALPLLIKEHDFFTNNRSVSVTASNGKTYTLHRYHVENNQPRPESYREDYITANNGSYYAASGIIYPVKTPLNETEKAVLYSNLASGAESGWDYTARWLRVPDDAARDVYFPLRSLNVREMVPVDLNSILYENEVIIAEYLEKAGNSSEAKRFASAAKQRSEAMYNLMWNATHWSYFDYNLTSNAQNIFVPADEDTASFDRYAAPPGQQVLFHVAQLYPFWTGAAPAHLKSNPLAVQKAYARVSRRLDTKKGAIAATNYRTGQQWDQPNVWPPLQHVLMQGLLNTPATFGESDPAYQGVQKLALRLAQRYLDSTFCTWYATGGSTSDFPQLQGVSPDATGIMFEKYADSATNVAGGGGEYEVVEGFGWTNGVLIWAADVFGNKLKRPDCGNITAAHTHSEAKRSLGDGGLARRAVELDPWDAAWTKMFGRSKLRRREAEDVRKRWSS

SEQ ID NO: 200 - protein, 661 aa, reesei GH37
LYINGSVIAPCDSPIYCHGDILREIELAHPFSDSKTFVDMPAKRPLSEIQTAFANLPKPLRNDSSLQTFLASYFADAGGELIQVPRANLTTNPTFLSKINDTVIEQFVTQVIDIWPDLTRRYAGDAAVKNCSSCPNSFIPVNRTFVVAGGRFREPYYWDSYWIVEGLLRTGGAFVGIARNTIDNFLDFIERFGFVPNGARLYYLNRSQPPLLSRMVKVYIDHTNDTAILRRALPLLVKEHEFWTRNRTVDVRVNNKTYVLNQYAVQNTQPRPESFREDFQTANNRSYYAASGIIYPATKPLNESQIEELYANLASGAESGNDYTARWLADPSDAMRDVYFPLRSLNNKDIVPVDLNSILYGNELAIAQFYNQTGNTTAAREWSSLAANRSASIQAVFWNETLFSYFDYNLTSSSQNIYVPLDKDAVALDRQTAPPGKQVLFHVGQFYPFWTGAAPEYLRNNPFAVTRIFDRVKSYLDTRPGGIPASNVNTGQQWDQPNVWPPHMHILMESLNSVPATFSEADPAYQDVRNLSLRLGQRYLDFTFCTWRATGGSTSETPKLQGLTDQDVGIMFEKYNDNSTNAAGGGGEYQVVEGFGWTNGVLLWTADTFGSQLKRPQCGNIMAGHPAPSKRSAVQLDMWDASRVKKFGRRAEGRMGTLHAW

SEQ ID NO: 201 - protein, 670 aa, Chaetomium virescens
LYINGSVTAPCDSPLYCQGEILKAIELARPFSDSKTFVDMPTIKPLEEVIAAFGRLKQPLSNNSELTAFLAENFAPAGGELEEVPKSELHTDPVFLNKLDDAVVKEFVGKVIDIWPDLTRRYAGPGNCSNCENSFIPVNRTFVVAGGRFREPYYWDSYWIVEGLLRTGGAFVGITKNILENFLDFIETIGFVPNGARIYYLNRSQPPLLTKMIKIYVDHTKDTSILQRALPLLIKEHEWWTNNRSVTVTGPNGKTYTLNRYHVNNNQPRPESFREDYITANNGSYYATSGIIYPVKSPLNETEKDETYANLATGAESGWDYTARWLRTPNDAAKDVYFPLRSLNVRNMIPVDLNSILYQNEVIIGEYLEQAGNKSEAQRWFQAANQRSEAMYALMWNATHWSYFDYNLTSNSQYIFIANDEDATTAEQANSPPGQQVLFSISQLYPFWTGAAPDQLKKNPLAVQQAYYRIERMLNEKAGAIPSTNFRTGQQWDEPNVWPPLQHILMQGLLNTPATFGTADPAYAAVQNLALRLAQRYLDSTFCTWYATGGSTSQTPQLQGVSPGATGIMFEKYADNATNVAGSGGEYEVVEGFGWTNGVLIWAAETFGNKLKRPDCGDIQAAHTHTDKKKRWSVDGEVRARERMAVELDPWDAKWTKMFGQAKGRVGRRS

SEQ ID NO: 202 - protein, 508 aa, Rhodothermus marinus
QDRVACQVPLPSVERIEAVRAYIRQSWDVLTRSHRDLLAAVQDPKIEHEPGTPWPLYIAATEDSVAVWHRLQQELPDSVLQQIVLRVLPEDPVAHLDEIHPHGLLYLPEPYVVPGGRFNEMYGWDSYFIVVGLLRDGRVDLAKAMTDNHLYQVRHYGKVLNANRTYYLTRSQPPFLSAMVLAVYAHTQDRDWLAAAVPLIERYYAYWTTPPHLAGETGLSRYYDLGEGPAPEVVAGERDAQGRTHYDRVREYYRMHEVTAYDESLYYVAEADSLTPLFYKGDRSMRESGFDPSNRFGPFSVDIIHYAPVGLNALLYRMETDLARIHEILGDTAAAAAWRARAEARRERVDRYLWDSERGLYFDYNFRTGRRSDYVFATTFYPLWVGMASPEQAARVAANLYLLEAPGGLLTSTHISGSQWDAPYGWAPLYLIAVEGLRRYGYDEAADRLTAKFVSMIVEDFERTGVILEKYDVVQRRSDVALRYGYTSNEIGFGWTNAVFAELLAQMD

SEQ ID NO: 203 - protein, 674 aa, Myceliophthora sepedonium
LYINGSVTAPCDSPIYCQGELLKAVELARPFVDSKTFVDMPTIKPVDEVLAAFSKLSLPLSNNSELNAFLYENFAQAGHELEEVPDSELETDAKFLDKLEDRTIKEFVGKVIDIWPDLTRRYAGPSNCTECANSFIPVNRTFVVAGGRFREPYYWDSYWIVEGLLRTGGAFTHISKNIIENFLDFVDTIGFIPNGARIYYLNRSQPPLLTLMVKSYVDYTNDTSILDRALPLLIKEHEFFMNNRTVSITGSNGKEYTLNRYHVENNQPRPESFREDYITANNGSYYASSGIIYPVKTPLNETEKAALYSNLATGAESGWDYTSRWLGVPSDAARDVYFPLRSLNVRDIVPVDLNSILYQNEVIIAEYLEKAGNSSAAKRFATAAEQRSEAMYSLMWNATHWSYFDYNLTDNTQHIFVPADEDTAPQDRIEAPPGQQVFFHIAQLYPFWTGAAPASLKANPLAVQQAYARVARMLDIKKGAIPATNYRTGQQWDQPNVWPPLQHILMKGLLNTPATFGKSDPAYQSVQNLALRLAQRYLDSTFCTWYATGGSTSDFPQLEGVTPGATGVMFEKYADNATNVAGGGGEYEVVEGFGWTNGVLIWAADVFGNKLKRPDCGNITAAHTHSSAKRGLEENKLPRRAVELDPWDAAWTKMFGRSKLRRREAEDVRKRWMS

SEQ ID NO: 204 - protein, 657 aa, Moelleriella libera
LHTNGSLIAPCDSPIYCYGDILKQVELARPFADSKTFVDMPGVKPLAEIQAAFDKLEKPLRNNTALQDFLKTYFADAGQELQEVPKSELKTDPQFLKTLNDTVIREFVTKVIDIWPDLTRSYKGSNTNCTDCPNSFIPINRTFVIAGGRFREPYYWDSYWILEGLLRTRGSFTQIAKNTLENFLDFVEQFGFVPNGARIYFLNRSQPPMLSQMVKLYIDHTNDTAILQRALPLLVKEHAWWMNNRTVDVQVGGKTYKLNRYAVSNTEPRPESYREDFETASNSSYYAQSGIIYPETKKLNDSQRAVLYANMATGGENGWDFSSRWIANPSDSVRDVYFPLRTNNAQNVVPVCLNSILYGNEMTIGGFFNSTGNTTAGQEWAAKAKARSEAMHATMWNETHFSYFDYNLTSSAQDVYTLADDDTSIYDNGTLTGAPPGYQVAFNGAQFYPFWQGAAPTYLKENPQAVKTAYARVAQYLKVRKGGIPATNLKAREQWDQPNVWPPLMHILMQGLLNTPPTFGSSDPSYKSVRSMALTLAQRYLDSTFCTWYATGGSTSETPKRPGLPEKDKGIMFEKYADNSIDIAGSGGEYEVVEGFGWTNGVLIWAADTFANELKRPDCGNGSSSSSTSSAAKRGLSAVELHPADASRIKRFGSSKG

SEQ ID NO: 205 - protein, 660 aa, Acremonium dichromosporum
IYVDGNITAPCDSPVYCYGEMLHQIQLAKPFDDSKTFVDMPALKPLSQIQAAFDRLDKPLSNNSALNNFLDEFFADAGGELSEVDKADLETDPVFLDKIDDEVVKEFTNKVIDIWPDLTRRYSGAAASNCTNCPSSFIPLNRTFVVAGGRFREPYYWDTYWIIEGLLRTGGSFTDISRDIIENFLDFVDQFGFVPNGARIYYLNRSQPPVLSRMVQAYIEHTNDTDILDRALPLLMKEHEFFSENRTIDIEGPNGTTYTLNRYDVRNNQPRPESYSEDYETATNTSYYSHDSGIIYPETEPLNDTERANLYSALASGAESGWDYSSRWIARPRDAAEDVYFPLRSLNTNNIVPVDLNSIMYANEMAIAGFLNQTGNASAAAEWEELAYNRSEAIHALMWNETYMSYFDYNLTSAAQHIYVPADDDVSTLESSTAPEGHMVLFSVSQFYPFWTGAAPSYIKNNPFAIAQIYKRVETLLDTRKGGIPATNFRTGQQWDQPSVWPPLMHILMAGLQNTPATFGEDDPAYQHVHEIALRIGQRYLDSTFCTWRATGGATSETPQLEGFTDRDVGIMFEKYADNSTNIAGGGGEYEVVEGFGWTNGVLIWTVDEFGNELKRPDCGDLEAADTTERRKRSALQLAPRDAQRTKKFGKRAVERQPWF

SEQ ID NO: 206 - protein, 667 aa, Fusarium sambucinum
LYVNGTVVAPCDSPIYCHGDILEQVELARPFSDSKTFVDMPAIRPLSEIQKAFDELDKPLRNNSALADFLSENFADAGNELEEVPEDELKTDPKFLDNINDTVIREFTEKVIDIWPDLTRRYDQDSKNCSDCPNSFIPVNRSFVVAGGRFREPYYWDSYWIIEGLLRTGGSFVNIAKNTIENFLDFIEEYGFVPNGARIYYLNRSQPPLLSQMVKIYIDHTNDTDILERALPLLVKEHEFFMKNRSVPVYINDETYMLNTYNVSNTQPRPESYREDYITATNKSYYSTSGEVYSGGEELSFKQKETLYGNLASGAESGLDYTSKWIARPENAIRDNYFPLRYLNTRNIIPVDLNSILYGNEIAIADFYEQTGNSSASEQWREVAANRSYAMHAFMWNETLWSYFDYNLTSKAQQIYFPADNNTVSVDTEDAPKGQQVFFSPTQFYPFWLGAAPDYLKNNPYAVLSAYKRVATYLDKREGGIPASNIETGQQWDQPNVWPPMMHILMAGLEKVPATFGIMDPSFIEIRKLALRLGQRYLDSTFCTWYATGGSTSETPKLESVSDKEDGIMFEKYADNATNTAGGGGEYEVVEGFGWTNGVLIWAVEEFGNRLTRPKCKNLETAHSSDKRDTSAVMLHARDAKHVKKFGRRKRAEEKAAKKRSSRLFHF

SEQ ID NO: 207 - protein, 660 aa, Phoma sp.
LYQNGSIIAPCDSPIYCYGDLLREIELAQPFSDSKTFVDLPTIRPLDEVLRAFNNLTKPIQNNTELNNFLTTYFGEAGSELDALPKDQLETQPDFLDNVNSSVIVNFTSQVIDIWPDLTRRYVGAGNCTGCVSSFIPVNRTFVVAGGRFREPYYWDSFWIIEGLLRTKGSFTQIAENIIENFMDLVEELGFVPNGARRYYENRSQPPLLTQMVRVYVEYTQNYTLLERALPVLEQEYEFWVNNRSVTLERGGKNYTLHHYNVSNTQPRPESYREDYITANNLTYYNENGEQFNASHPLNDTQKALLYAELASGAETGWDYSSRWLANPSDAVNDDFFPLRSLNVINTIPVDLNSILYYNEITIAEFHRREGNYCAARQWAELARNRSEAMTALLWNAEYYSYFDYNLTSSAQNIYTLADNTSTPLSLAGAPAGYQVGFQLSQLYPFWTGAAPDSIKGDPTAIRRAFARVEEALDTEAGAVSATNLFTGQQWDEPNVWPPLQYIAIQGLLNTPLEVSEDDDEQTAEDYVWTQNLALRLAQRYTDSLFCTWRSTGGATEEEPQLPGATGNGTIFEKYSDEAINARGGGGEYTVVEGFGWSNGVLIWAVDNFGQKLTTPDCGNITAAAPPSTASKRKRSAVEIHQRDAAWIKGTKENKMFGKK

SEQ ID NO: 208 - protein, 737 aa, Lentinus similis
LPQAVTPSSTSVSSQTVSTAVPSPTASLTSTLPSQIPLPPKQDWCPSEIFCAGELLQTVNVAQLYPDPKTFVDKPTARKSQQVVSNFQNIGGNSSNVTVGAIEDFVNSNFKGEGLELEPIAFANFNPTPAFLNNVSDPLVKAWSQIVHGYWTQLTRSTNDSALCPEGTESGSCESSLIPLNHTFVVPGGRFREQYYWDSYWIVQGLLVSELYDIVNDTLQNFMDELEHIGFIPNGGRIYYLNRSQPPLFIHMLTSYVQASGDTSILKRALPLAEKELAWWSANRSVQVKSPYTNATHNVYRYHVTNTAPRPESYYTDYITANDPTLQTPLTEQQRADLYAELATGAESGWDYSSRWLKEPLAGGSNNTSPALRSLNIRSLVPVDLNSILYKAHLNLAALYNNESHSAAASNHTQAAIALREAILDLHWDANKRAFYDFNITSNARNDIFSAATFYPLWSGIIPDEILSDGSGATAFGAFAAVNMVLNRYNGTFPVTFLETGLQWDAPNAWPPHQFIIIEALRNLPSNITNTPLPSAPSGNSTYALIPAGQVGIAEGDLPGQILSPGQNATKTGPAADINTLNGTVVNGGNATSGEGWAAVLQRELANRYIASALCSWHATGGEVPNLLPRLSDSQLQITQSQNNTGNMFEKFSINDIDSAGRGGEYTVQAGFGWTNGVVLYLTHVFGDKLVAPSCPNLVALSSNTATTSGAVAQMTLPSSLAVTVGAVVLGFVGLVL

SEQ ID NO: 209 - protein, 683 aa, Diaporthe nobilis
QTLDGIYYDGDNIAPCSSALYCYGDILDSIQRAKPFADSKTFVDMPTRVPLEEVRAAYDQLTKPLQNNTELLDFLSNNFGPAGQEVVPVDPGSLGVNASFLGGIANAVNREFTEAVIDLWPNLTRWVNESAVCAECDNSLLSIKRPFIVAGGRFREPYYWDSYWILHGLLRSGGNFTRIARNQIENFLDFVEDYGFVPNGARVYYLNRSQPPLLAQMVRIYIEQTGDATILDRAIPLLIREHDFFMSNRTVHVSVGSRNYTLNRYNVANTEPRPESYYEDYTQVNNASYYANDGRVFPTRNTTQAEKDLQYKNLASGAESGWDFSTRFMRDPTIAANDTYFPLASYNIINIIPVELNSILYWNEVTIAAFLRQQQQQVPNATAEADADAWDARAASRSEAMYSVMWNETLGGYFDFNLTSGSQDVFWARDADSLPTEQAGTEPGQQVVFNIGQLSPFWTGAAPRSLAGDPAAVRRAFSRVDEYLGSRKGGIAPTNFVSGQQWDQPSVWPPHMHILMEALLRTAEAGGESEGGSEDWAWAQDLALRLGQRYFDSAYCTWRATGGGTPSSPPLANPPQDLGGQMFEKYSDQSLNEAGSGGEYVVVVGFGWSNGVLIWVADTFRDRLQTPACGDLTTRGEAGKMREKRMSENGRHGDGSNAISAVKLDYFDAAWTSENVGGLHGVR

SEQ ID NO: 210 - protein, 763 aa, Solicoccozyma terricola
QGNSSMSASNATSSSTGTGTSSSAAAVMTAVPMPTAPLSSPVEMLPLPPVQPWCNGGENATYCPGSLMQLVQLSGIYNDSKTFPDKPTQYNASVTYQAFDALPVNATVGDVETFVEKYFKGEGQELETVQIQNFTQNPTFLNVIDDELYKGFVSTVNGYWSLLVRQTNESALCTNGACESSLIPLNRSFIVPGGRYREIYYWDSFWILEGLLKSELYLYAYNLLENFMDLIEKFGFLPNGGRSYYLNRSQPPVFVQMLNAYIQVTGNVSILTRALPIAETELQWWRTNRTISVTSPYTGTNYSVARYFVTNSAPRPEGYVEDITTAFGGNPALNESARSALYAELASGAETGWDYSSRWCKQPLLNLTDNDPALRTLNVRQQIPVDLNSLLCGDHVLLANLYEFYMNSTIGGGSGISSGGGNSTIGMGAWANSTSGSNMTSNSTSSSNMTGLVQSHRMIAKEFEAAINDLMWDKQKLWWYDFNMTANARADVYHPGGLFPLWQNITPSDIVGNDTAAFGVFAGVRYMVGMYPGPPAPASLIQTGLNWDAPNVWPPHVYTGIKALETVLRINPNSSVVPNITLTDFTRIPTGQLGLNQSQLPPQPASALGNGTADLDQAIAQMQKGKPWPTALAIEFANRYLQSAFCSWYSTGGSIPGLLQQLSPQELNLTGSLTTGSQAMGNIFEKFNLTNVDAAGGGGEYTVQIGFGWSNGVILHTAGEYGQYLVQPSCPLIAIHETANATSTNATKSNNTMVFSGYRLPHD

SEQ ID NO: 211 - protein, 734 aa, Dioszegia cryoxerica
QSSSSSSFSPTPVTTAVPSATAALNQTVSGQGVYPPLQPWCNAGENATYCPGVILQDVQLSGLFPDSKTFVDKPTNGTQNATQQAFQQLGNNITLGQLAQFVNTSFRGEGLELSQVPINGFVANPAAVNKVSNPLYRGWVSTVNSYWSLLIRETNQSAVCTTQCESSLIPLNYTIVVPGGRYREIYYWDTFWILEGLLKSELYTYAWDVLQNFMDFVDVYGFIPNGGRKYYLNRSQPPVFIQMLDAYVKATGNVTILERALPLASEEMRWWINNRTTQVTSPFTGITRRVYVFNVTNSAPRPEGYVEDYEAAFGAQPPLTEAQRGALYAELATGAESGWDYSSRWCKQPVINVTDNLPALRTLNGRSIVPVDLNSLQAGNHALLARLYEVYINASTTSNTTAAQTIRANATQEIALHKTLANDYSQAVLDLHWDPARAWFYDFNLTSNSRESLYTPAGTFALWQNITPPGLEGNDTAALRIASGARYLLGRYGGIQGVSSLLVTGLNWDFPNSWPPHTYTSIKAFQTLGRLVGNASIVGNATIPFSQVATNQLGLNETQLPPQDPALQGNASLTVPSARNVSWPLALEIEYASRYMQGAFCSWYSTGGSISGLLTQLPVSQLNATGTYQAGQTGQMFEKFNATDIDAAGGGGEYTVQIGFGWTNGVVLWLADNFGQYLPQPTCPLVVLSLTNLNSTTAGNSTNGTSPAAPGNATSLVAVSELQGIWEGQRVSRD

SEQ ID NO: 212 - protein, 1020 aa, Talaromyces funiculosus
LPFNERVDQVLRSYEVTSKLDSRSTKPSKHGHTYQTQFLGVTWDQRNWRLQSTVLDQGHYESRGSIANGYIGLNVAGAGPLFELDSPVDGDVINGWPLFSRRQTFAGLAGFYDLQPRTNGTNFPWLSQYGDDSAISGVPHWGGMVLDLGDGEYLDATVDNSTISDYTTTYDYKAGVLSWDYKWTPKNANGSFGISYKIFANKLDVNQAVVQLSITPSTNGSASVVNVIDGYAAVRTDFVSSGNESDVVYTAVKPNGVTNVTAWIYTALDGDDAFDISSAALVNDKPYVHQNDSSIAQSVNVTFTAGTTITINKFVGAASTDAFPDPQSTAREAALSARRRGFDDLFRSHISEWAQVMPDDSVDDFTLANGTLPNDTFIIESAVMAVVNPYYLLQNTVGPNALRRVNNAPVNDWSIPVGGLTSDSYAGQIFWDADVWMQPGLVAAFPESAKRITNYRAAKYSQALENAKTAYTSSQNQTWFSPDAAIYSWTSGRVGNCTATGPCWDYEYHLNGDIGISLVNEWVVSGDNETFKNKHFPIYNSIATLYGDLLKKNGSYYTLTNMTDPDEYANNVDAGGYTMTLISQTLSNANAFRKQFGMNENTTWTEMADNILLIRENDVTLEYTTMNNSVAVKQADVILSTFPLDYTKNYTTSAALNDLDYYALKQSPDGPGMTYAIFSIVANDVSPSGCSAYTYAQYSYDPYIRGPFFQFSEQLLDDYTINGGTHPAFPFLTGHGGANQVVLYGYLGLRLLPDDMLHIDPNLPPQIPSIKYRTFYWRGWPIQAASNYTHTTIQRATTVAPLSTADPTYANKSIHVSVGHNTVNSTTYSLSANGSALVVPNRQIGSINTVAGNVVQCKSVLSTDAYQKGQYPISAVDGAASTKWQPEFAANISSLTVDLTGSNVSSVSGFYFDWAQAPPTNITVLLHNSSSAALASSGDKPGSSAVTLNITISNPYNASTYNANIIALPSSNSTNYTFPAPVPKPRYATLFVQGNQALDETDTKSGNGTGATVAEWAILS

SEQ ID NO: 213 - protein, 1063 aa, Hamigera avellanea
ASPKSRINQCLKKHAGQGSHDDETSSNVYQTRFPGVTWDEDNWSLTTSVLDQGHYQSRGSVANGYLGINVASVGPFFELDIPLNGDVINGWPLYSRRQTFATISGFFDSQPETNGTNFGWLNQYGGESVISGVPHWSGLILDLGDGTYLDSTVDNATLSGFTSSYDFKAGVLSWSYQWTPEGKHGSYDITYRLFTNKLYVNQAVVDMEIVPTVAGKASVVNVIEGSSAVRTDFVESGEDDGAIFSAVRPWGISNVTAYFYANLTVSDNVDLSSRTLVSNKPYVSTNESSIAQSVDVQFIPGKSVRITKFVGAASTDAFANPQETAKRAASTAQTNGYLKSLNSHIAEWASVMPDDSVEDFSLPETGKLPADEHIIESAIISVTNTYYLLQNTVGKNAIKASSDAALNMDSISVGGLTSDSYAGLIFWDADIWMQPGLVASHPEAAEVFTNYRVAKYPQAVKNIETAFASSKNQTNFSPSAAAYPWTSGRYGNCTGTGPCFDYQYHLNGDIGLSMINQWVVSGDTQTFREKHFPIYDSAATFFSNLVERNGSTWTLTNMTDPDEYANHIDAGGYTMPLIAETLLYANSFRKQFGVEPNETWNEIAENVLVLRTNGVTLEFTSMNGSAPVKQADVVLVTYPLDYNNNYSPEDSLNDLDYYANKQSEDGPAMTWAIFSVVANEASPSGCSAYTYAQYAYYPYARAPFFQLSEQMIDDASINGGTHPAYPFLTGHGGANQVNLMGYLGLRLLPDNVIHVDPNLPPQIPHLKYRTFYWRGWPMSAASNYTHTTIQRAVNVPALSTADQKFANVSIPVHVGPETNATVYRLPVNGTLTIPNRQIASKNTVAGNLIQCRPVESQNDFQPGQFPISVVDGASSTRWQPKHADNVSAVTVTFADEEVGSLVSGFYFDWAQAPPVDAAVIFHNSSLENPASAFSFASNSSSSEYSVITTLKNVEQSDPYDPESDKLDIIAIPTGNTTKVTLPSAVPAARYATLFITGNQALGPEDIAAKNGTGATVAEWAIVGQTSSATSKRSIQTRKLQVRSGAALSGLGFAQRRRQSAEMY

SEQ ID NO: 214 - protein, 1020 aa, Talaromyces ruber
LPFNERVDHVLRSHDLTSRLHSRSAKPSNHGGTYQTQFTGVTWDQRNWRLQSNVLDQGHYESRGSIANGYIGLNVAGAGPFFELDTAVDGDVINGWPLFSRRQTFAGLAGFYDLQPTTNGSNFPWLDQYGDDSVISGVPHWGGLVLDLGNGEYLDATVDNSTISDYSTTYDYKAGVLSWHYKWTPKNANGSFEIKYKIFANKLDVNQAVVQLSITPSANGSASVANVIDGYSAVRTEFVASGNESDAIFTAVKPVGVSNVTAWIYAALDGDDAFDFSSATLVNDKPYVHQNDSSIAQSVNVTFTAGTTITINKFVGAASTDAFPDPQSTAREAALKARRRGFDDLFRSHISEWAQVMPDDSVDDFTLANGTLPNDPFIIESAVMAVVNPYYLLQNTVGPNALRRVNNAPVNDWSIPVGGLTSDSYAGQVFWDADVWMQPGLVAAFPESAKRITNYRTAIYSQALENAKTAYTSSQNQTSFSSDAAIYSWTSGRYGNCTATGPCWDYEYHLNGDIGISLVNQWVVSGDNDTFKNTHFPIYNSIATLYGDLLKKNGSYYTLTNMTDPDEYANNVDAGGYTMTLISQTLSNANAFRKQFGMDENTTWTDMADNVLLIRENDVTLEYTTMNNSVAVKQADVILSTYPLDYTKNYTTSAALNDLDYYALKQSPDGPGMTYAIFSIVANDVSPSGCSAYTYAQYSYDPYIRGPFFQFSEQLLDDYTANGGTHPAFPFLTGHGGANQVVLYGYLGLRLLPDNVLHIDPNLPPQIPSVKYRTFYWRGWPIQAASNYTHTTIQRATSVAPLSTADQTYANRSISVQVGQNTVNSTTYSLPANGSAIVVPNRQIGSINTVAGNIAQCKSVLSTDAYQPGQYPISAVDGAASTKWQPEFAANISSLTVDLTSSNASTVSGFYFDWAQAPPTNITVLLHNSSNAPLTSSNSNGGNSTVSLNVTISNPYDASAYNANVITLSSSNTTNYTFPAPVSKPRYATLFVQGNQALDETDLKAGNGTGATVAEWAVLS

SEQ ID NO: 215 - protein, 1055 aa, Trichoderma lixii
ATSNNRVSECLGRNGGSSTGVHFSKNVYKTDFAGVTWDEDNWLLSTTELKQGAFESRGSIANGYLGINVASVGPFFELDTEENGDVISGWPLFSRRQSFATIAGFWDSQPVMNGTNFPWISQYGSDTAISGIPHWSGLILDLGGNTYLDATVDNRTISNFRSTYDYKAGVLSWSYKWTPKGNKGSFDISYRIFANKLYVNQAVVDLQVTASKNVEASIVNVIDGFAAVRTDFVESGEDGNAIFSAVRPNGVANVTAYVYADITGSGGVDLSSRKIVHNKPYVHANASSIAQAVPVKFSAGRAVRVTKFVGGASSDAFKNPKQIAKSAAATALKNGYSKSLNSHVTEWAAVMPESSVDSFADPKTGKLPNDNYIIDSAIIAVVNTYYLLQNTVGKNGSKAANGAPVNVDSISVGGLTSDSYAGQVFWDADLWMQPGLLAAHPEAAERIINYRLARYGQAKENVKTSYAGSQNETFFSASAAVFPWTSGRYGNCTATGPCWDYEYHLNGDIGLALVNQWVVNGDTKDFEKNLFPVYDSIAQLYGNLLKPNGTAWTLTNMTDPDEYANHVDAGGYTMPFIAETLQNANTFRKQFGIEQNKTWNDMASNALVLRENGVTLEFTTMNGSAVVKQADVIMVTFPLSYTTNYTTEDALNDLDYYANKQSPDGPAMTYAFFSIVANEISPSGCSAYTYAQYAFKPYVRAPFYQLSEQIIDDSSINGGTHPAYPFLTGHGGANQVVLFGYLGLRLVPDDFIHIEPNLPPQIPYLRYRTFYWRGWPISAWSNYTHTTISRASGVAALDGADQRFAGKTITIHSGPEESPKAYHLPVKGSVVVPNKQIGSQQTYAGNLVQCHAASSPSDYVPGQFPIAAVDGATSTKWQPASADKLSSITVSLDQEDVGSLVSGFHFDWAQAPPVNATIIFHNEAINDPATVLKSQKHNSNYKVVSSLTNIKQSNPYIKTTDLDIIAIPIGNTTNVTLSQPVAASRYASLVIVGNQGLDHADVVGKNGTGATVAEWAIIGHSKGHTGAPGHHGKRKLNLRAAAAMSDPDSFARRRQ

SEQ ID NO: 216 - protein, 1056 aa, Aspergillus cervinus
STFSHKNDRILKGLKRHGDHYSRKSNTNSTDVYQTKFDGVTWDDDNWLLTTTALDQGDFRSRGSIANGYLGINVASVGPFFELDTAENGDVISGWPLFSRRQTFATIAGFFDSQPTTNGSNFPWLYQYGGDSVISGVPHWSGLVLDLGNDTYLDSTVDNQTIENFTSMYDYKSGVLSWSYTWVPAGNKGSFDIVYRLFAHKLNVNQAVVDMEITPSLSFNATVVNILDGYSAVRTDFVESGNDNGAIFTAVRPWGISNVTAYVYANLTGTPNVDLSSRTIVANKPYVHTNASSIAQAVNVSCSPNETVRITKFVGAASSDAFENPQETARQAVSAAIGAGYLRSLGTHIAEWASIFPDDSVDRFTDPATGKLPANKHIINSAIIAVTNTYYLLQNTVGKNAIQAVSGAPVNIDSISVGGLTSDSYAGQVFWDADVWMQPGLAASHPEAAQRITNFRAAKYPQALANIETAFTSSKNQTSFSPSAAAFPWTSGRFGNCTATGPCWDYEYHLNGDIGLSLMYQWIASGDTQTFRETHFPIYDSIATMYSNIVERNGSYWTLKNMTDPDEYANQIDAGGFTMPLISQTLNYANAFRQQFGLDVNQTWSEIANNVLVLNDNGVTLEYTTMNGSTVVKQADVVLDTYPLVYSNNYTSQNSLDDLDYYANQQSPDGPAMTWAIFSIVANDVSPSGCSAFTYHQYSYDPYARAPFFQLSEQLIDDASTNGGTHPAFPFLTGHGGANQVVIFGYLGLRLLPDEAIHIDPNLPPQIPHVAYRTFYWRGWPISAQSNSTHTTISRAMNASPLDTADSRFANVSIPIYVGTESNATVFQLPPTGPLTILNRQNGFNNTIPGNVAQCRPVYSPDDYAPGQFPIAAVDGATSTRWQPSSANTSSVTVTLPDTQINSPVSGFYFNWWQLPPVNATVIFHDDLLENPAATISSSGNSSSYRVVMTLTNIQQSSPYNAQIAALDEITIPTGNTTTVQLTNHAQTSRYATLLISGNQGLGDTQDGVGATVAEWVILGQGQGSSSSNSNGKRKLGARSAAALSNGWTERRRRLI

SEQ ID NO: 217 - protein, 1053 aa, Rasamsonia brevistipitata
LRSEARVAQVVRAYSSSTGVEAGHGNATQYETRFPGVTWDQRHWRLKSTVLDQGHFQSRGSIANGYVGINVASAGPFFELDTPVDGDVINGWPLFSRRQTFATIAGFYDEQPRTNGSNFDWLYQDGGESVISGVPHWSGLILDLGDGTYLDATVDDSTISDYSTVYDYKAGILSWSYKWTPKSSKGSFKISYRLFAHKLNINQAVVRMEITPSADTDATVVNVLDGYSAVRTDFVGSGKDGDAVYSAVSPWEVQNVTAYVYAVLDGSDGVDLSTLSLVNGKPYVHTNESSIAQSVNVRFRAGKTVTVTKFVGAASTDAFPDPQQTAREAALAAKEEGYDALLRSHVAEWAAVMPEESVDDFTYHNGTLPGDDFIVESAIMAVVNPYYLLQNTVGENALREVSHAPVNEWSISVGGLTSDSYAGLIFWDADLWMHPGLAVAFPQAATRITNYRVAKYEQARQNAKTSFTGSKNQTWFSDSAAVYPWTSGRYGNCTGTGPCWDYEYHLNGDIGLSLINEWVASGDTKTFQESYFPIYDSIATLYADLLQQNGSHWTLTNMTDPDEYANAVDAGGYTMPLIAQTLLYANSFRQQFGAQPNSTWTEMASNILFLRENDITLEYTTMNNSVQVKQADVVLVTYPLEYTTNYNAGNALTDLDYYALKQSPDGPAMTYAIFSIVANEVSPSGCSVYTYAQYSYDPYVRPPFFQLSEQLVDDYTLNGGTHPAYPFLTGHGGANQVVIFGYLGLRLLPDNVIHIDPNLPPQIPQVKYRTFYWRGWPIQAYSNYTHTTIGRAADVLALDTADQRFANTTIPVQVGSGSNATVYQLPIDGVLTVANRQVASTNTVAGNLAQCQPVDSSDSYVPGQYPLAAVDGAASTKWQPSFAANVSSVTVSLPESESGTLVSGFYFDWAQAPPVNATVVFHNNTVENPTRYMSSPTFVTHIDNITLSSPYNAEANPAATILLPSSNTTNVTLAHPMPVPRYATLFITGNQALSESEVQAQNGTGATVAEWAILASNPETGSSKRNLQLRGVGRSALAGLPRRANRKERRTDV

SEQ ID NO: 218 - protein, 1034 aa, Acremonium curvulum
LEERVSQTLNRHGVRSSYNRRADNGDQNRISNTSHPYIYQTSFEGVTWDSRNWRLQGTVLDQGHYQSRGSIANGYFGINVASAGPFFELDTPVDGDVINGWPLFSRRQTFAGLAGFWATQPTTNGTNFPWLYQYGDESPISGIPHWGGLVLDLGDDVYLDATVDNKTIKNYRTTFDYKAGVLTWDYTWSPKKRGSGSFDITYSLFANKLDINQAAVRLSIRPSRDTKAKVVNVLEGYAAVRTDFVDSGKDGDAIYSAVRPVGVNNVTAYVYAVLDADSAVDLSSAKVIDDAPYLYTNKSTIAQSVNVEFKANQNVTITKFVGIASTDAFPKPRDVAKQAAFAGKRRGYDDALRSHVSEWAQVMPDDSVDDFSSDNGTLPDDGFIIESSIMAVVNPFYLLQNTVGANALRRVNNAAVNDYSISVGGLTSDSYAGLVFWDADIWMQPGLAAAFPEAAQRITNYRVALYPQAKRNIKTAFQSSKNKTRFSDDAALYPWTSGRWGNCTASGPCFDYEYHLNGDIGIAFVNEWITSGDEKAFEEKYFPIYDSIATAFANLLQKNGTQWTLTNMTDPDEYANHVDAGGFTMPLISQTLTYANLFRKKFGKEENDTWADMAENVLILRENDVTLEYTAMNNSVEVKQADVVLNTFPLDYTRDYAPSAALNDLDYYALKQSPDGPAMTYAIFSIVANEVSPSGCSAYTYAQYSYSPYLRGPFHQLSEQLTDDFTTNGGTHPAYPFLTGHGGANQVVLFGYLGLRIVPDDKIHVDPNLPPQIPQVKYRTFYWHGWPIAAKSNYTHTTISRATTIKELDTANKKYANASIQVVVGSGKSAKTYKLPANGSSIVVANRKIGTVNTLEGNMIQCQPAQSFDTFVPGQFPISINDGAASTKWQPEFANNISAVTVTVPASKSKKISGFYFDWAQAPPTNATVVLHDEKMDNPTMVLLPVSKDDDKKGSVARVNVTISEPWSAKDKSNFVIGLQGGNTTNFTFSEPVAAKRYATLFIQGNQALDKVDIKYKNGTGATVAEWGILSDDA

SEQ ID NO: 219 - protein, 1015 aa, Talaromyces piceae
ARVDQVLQARDTHHPSLHSSSSYQTRFDGVTWDQRNWRLQSRVLDQGHYQSRGSVANGYLGINVASAGPFFELDTPVDGDVINGWPLFSRRQTFAGLAGFYDRQPTTNSTNYGWLNQYGDESVISGIPHWSGLVLDLGDGHYLDATVDSSTISDYTTTYDFKAGVLSWDYNWAPRQHGGGNSSFHISYQLFAHKLDINQAVVKLSITPSASGNASVVNVIDGYSAVRTEFVKSGTDGDAVYSAVSPVGVSNVTAWVYTVLDGDEAFNLSSAQLVTGKPYVYQNDSSIAQSVNVEFRAGETVTITKFVGAASTDAFADPRQTARDAALLAKKKGFDDLLRSHVSEWAQVMPDGSVDDFTREDGTLPDDEFIIESAVTAVVNPFYLLQNTVGKNALQRVSNAPVNDWSIPVGGLSSDSYAGLIFWDADVWMQPGLVAAFPESAQRITNYRAAMYRQARANIQSAFASSQNKTVFSPDGAIYPWTSGRYGNCTGTGPCFDYEYHLNGDIAISLVNQWVVSGDTETFKNEHFPIYDSIATMYADVLKKNGSFYTLTNMTDPDEYANNKDAGGFTMPLIAKTLLNANDFRKQFNMEENSTWNEKAASVQILRENDVTLEYTTMNNSVAVKQADVVLMTFPLDYTANYSSSSALNDLDYYALKQSPDGPGMTYAIFSIVANQVSPSGCSAYTYAQYSYYPYARAPFFQLSEQLLDDYTANGGTHPAYPFLTGHGGANQVVLYGYLGLRLVPDETLYIDPNLPPQIPQVKYRTFYWRGWPIQAASNYTHTTIRRATTVAPLDTADEKYTDEAITLHVGQQSDGNKYQLPADGTPVTVANRRVSSVNTVKGNMIQCQPVQSTASIQPGQFPIAAVDGAASTKWQPEFAANASSLTVEIPSSGKKRKTVSGFFFDWAEAPPTNATVVLHNNPVSEPTLSSFEAGKDGVVLRAFDIEISSPYNASTYADEIIIPQGNSTNYTFSHPVPAPRFATLFVQGNQALDKVDVENKNGTGPMVAEWVILE

SEQ ID NO: 220 - protein, 1022 aa, Penicillium sp.
LPLEERVDRVLRSYSVGSGLEARHSKYTYQTQFDGVTWDQQNWRLESTVLDQGHYSSRGSIANGYIGLNVAGAGPFFELDAPVDGDVINGWPLFSRRQTFAGLSGFYDVQPTTNGSNYPWLDQYGYDSVISGIPHWGGLVLDLGNGDYLDATVDNSTISDYTTTFDYKAGVLSWDYNWTPKNTSFGISYKIFSSKLDINQAVVQLSITPSANGTASVANVIDGYAAVRTEFVTSGNDSDALFTAVKPTGINNVTAWIYAVLDGDDAFDFSSATLVNNKPYINQNDSSIAQAVDVEFTADSTVTITKFVGAASTDAFADPQKTAKDAALAARIKGFEDLLRSHVSEWAQVMPDDSVDDFSLADGTLPDDIFIIESSVMAVVNPYYLLQNTVGENALRRVNDAPVNIWSIPVGGLTSDSYAGQIFWDADLWMQPGLVAAFPESAKRISNYRVAKYPEALANTNTSFAGSQNHTTFSSDAAIYSWTSGRYGNCTATGPCWDYEYHLNGDIGISLVNQWVTSGDTETFQNDLFPIYNSVATLYADLLKLNGSYYTLTNMTDPDEYANNVDAGGYTMTLISKTLSNANAFRKHFGLDQNSTWTEMAENVLVIRENDVTLEYTTMNNSVAVKQADVVLSTFPLDYTMNYTTSDAVNDLDYYALKQASDGPGMTYAIFSIVADKVSKSGCSAYTYAQYSFDPYIRSPFFQFSEQLDDDYTTNGGTHPAFPFLTGHGGANQVVLYGYLGLRLLPDNVLHIDPNLPPQIPSVKYRTFYWHGWPIQANSNYTHTTIRRATTTAPLSTADQTYSNTSITVQVGTSNGTTYSLRVDGTPLTIKNRRIGSVQTISGNIAQCQPVQSPDSYEPGQYPLSVVDGASSTKWQPESAANISSVTVTLGSSYSPGNSSNATASSILGFYFNWAQAPPDNITVVLHNASIPYLNASLSSLSNTTTTTSLNITVSNPYDSSADEKIIVLPSSNTTNYTFPSPVPVPRFATLFIQGNQGLDQTDLEYGNGTGATVAEWAILSA

SEQ ID NO: 221 - protein, 1020 aa, Talaromyces aurantiacus
LPFQDRVDQVLRSYSAKTLDIRSAKSSSKHGNTYETQFPGVTWDQRNWRLQSTVLDQGHYESRGSIANGYIGLNVAGAGPFFELDTPVDGDVINGWPLFSRRQTFAGLAGFYDLQPTTNGSNFPWLDQYGDDSAISGVPHWGGLVLDLGDGQYLDATVDNSTVSDYKTTYDFKAGVLSWDYKWTPKSSNVSFGISYKVFANKLDVNQAVVQLSITPSANGSASVVNVIDGYSAVRTDFVSSGNESDAIYTAVKPLGVSNVTAWIYATLDGDDAFDFSSATIVNNKPYVHQNDSSIAQSVNVTFTAGTTVTINKFVGAASTDAFPDPRSTAKEAALAGRRRGYDDSFRAHISEWAQVMPDDSVDDFTLANGTLPNDTFIIESAVMAVVNPYYLLQNTVGPNALRRVNNAPVNDWSISVGGLTSDSYAGQVFWDADVWMQPGLVAAFPESAKRITNYRAAIYSQALANAKTAYTSSQNQTSFSSDAAIYSWTSGRYGNCTATGPCWDYEYHLNGDIGISLVNQWVASGDNETFKNTHFPIYNSIATLYGDLLKKNGSYYTLTNMTDPDEYANNVDAGGYTMTLISQTLSNANAFRKQFGMDENTTWTEMADNVLLIRENDITLEYTTMNNSVAVKQADVILSTYPLDYTKNYTTSAALNDLDYYALKQSPDGPGMTYAIFSIVANDVSPSGCSAYTYAQYSYDPYIRGPFFQFSEQLLDDYTANGGTHPAFPFLTGHGGANQVVLYGYLGLRLVPDDKLHIDPNLPPQIPSVKYRTFYWRGWPIQAASNYTHTTIQRATRVAPLSTADMTYANKSISVQVGQNTANSTTYSLPVNGSALVISNRQIGSINTVQGNIAQCKSVQSMNGYQPGQYPISAVDGAASTKWQPEFAANVSSLTVDLTSSNASSVSGFYFDWAQAPPVNVTVVLHNSTSASLTSSAAQNGSSTVSLNITISNPYNASSYDANVIELSSSNTTNYRFPAPVPKPRYATLFVQGSQALDETDMKAGNGTGATVAEWAILS

SEQ ID NO: 222 - protein, 1016 aa, Talaromyces pinophilus
LPFNERVDQVLRSYSPKNLESRSTKHGNSYQTQFSGVTWDQRNWRLQSTVLDQGHYESRGSIANGYIGLNVAGAGPFFELDTAVDGDVINGWPLFSRRQTFAGLAGFYDLQPTTNGSNFPWLSQYGDDSAISGVPHWGGLILDLGDGEYLDATVDNSTISDYTTTYDYKAGVLSWDYKWTPKNSKASFGINYKIFANKLDVNQAVVQLSITPSANGSGSVVNVIDGYSAVRTDFVSSGNESDVIYTAVKPVGVNNVTAWIYAALDGDEAFDFSSAELVNDKPYVHQNDSSIAQSVNVAFTAGTTITINKFVGAASTDAFPDPQSTAREAAMTARRRGFDDLFRSHVSEWAQVMPDDSVDDFTLANGTLPNDTFIIESAVMAVVNPYYLLQNTVGANALRRVNNAPVNDWSIPVGGLTSDSYAGQIFWDADVWMQPGLVAAFPESAKRITNYRTAKYSQALENAKTAYTSSQNQTSFSSDAAIYSWTSGRYGNCTATGPCWDYEYHLNGDIGISLVNQWVVSGDNETFKNTHFPIYNSIATLYGDLLKKNGSYYTLTNMTDPDEYANNVDAGGYTMTLISQTLSNANAFRKQFGMDENTTWTEMADNILLIRENDVTLEYTTMNNSVAVKQADVILSTFPLDYTKNYTTSAALNDLDYYALKQSPDGPGMTYAIFSIVANDVSPSGCSAYTYAQYSYDPYIRGPFFQFSEQLLDDYTANGGTHPAFPFLTGHGGANQVVLYGYLGLRLLPDDMLHIDPNLPPQIPSVKYRTFYWRGWPIQAASNYTHTTIQRATSVAPLSTADPAYANTSISVSVGQNTANSTTYSLPVNGSAIVVPNRQIGSINTVAGNIAQCVSVLSTDAYQPGQYPISAVDGAASTKWQPEFAANVSSLTVDLTSSNASSVSGFYFDWAQAPPTNITVLLHNSSSAALTSSSTHGGSSSVSLNITISNPYDASSYDANVIALSSSNTTNYTFSAPVAKPRYATLFVQGNQALDETDTKAGNGTGATVAEWAILS

SEQ ID NO: 223 - protein, 1069 aa, Talaromyces leycettanus
TSANARINRCVKKHAGGKTPSGPSNNTYQTRFPGVTWDQDNWCLSTTTLDQGHYESRGSVANGYLGINVASVGPFFEFDTPVDGDVINGWPLFDRRMSFATISGFWDQQPTTNGSNFPWLYQYGGESVISGVPHWSGLILDLGDNTYLDATVDSRTISGFSTTYDFKSGVLSWSYQWTPAGNMGSYNITYRLFAHKLYVNQAVVDMEVVSSTEAKATVVNVIDGASAVRTDFVESGQDDGAIYTAVRPWGIANVTAYIYANITGSDNVDMRSRALVTNKPYVNGNASSITQAVNVHFTPGKSVRITKFVGGASSDAFSNPQQIAKQACSTAQANGYVKSLRSHVAEWASVMPDDSVDDFTFPSNGTLPADEYIIESQIISVANTYYLLQNTVGKNAINASSSTELNKDSIAVGGLTSESYAGMIFWDADVWMQPGLVASHPEAAQRITNYRVAKYPQAKANVATAYQSSKNQTNFSPDAAVYSWTSARYGNCTATGPCWDYEYHLNGDIGLSIINQYVASGDTQTFKEKLFPVFDSVATLYSNIVQKNGSSWTLTNMTDPDEYANQVDAGGYTMPLIAQTLLYANSFRQQFGLETNDTWNEIAQDVLVIRENGVTLEFTTMNGSAVVKQADVVLDTYPLGYTHNYGPTDALNDLDYYANRQSPDGPAMTWAIFSVVANQISPSGCSAYTYAQYAFSPYARAPFYQLSEQLIDDASLNGGTHPAYPFLTGHGGALQVNLFGYLGFRYLPDNVIHIDPNLPPQIPHITYRTFYWRGWPITAASTYTHTTLSRAWNVSSLDSADPKFANASIPVHVGLESNVTVYRLPVNGTLTVPNRMVGSKNTLAGNMVQCRPVQSMDGYQPGQFPISVVDGASSTKWQPLYSANVSSVTVTLSSSAVGKSVNGFYFDWAQNPPVNAAVVFHNSSFAQNPATTFSFDNPSASGNLYSVVSVLKDIQLSDPYDPATTDLDVIAIPKGNTTNVTLSSPVPAARYATLFIQGNQANSPAEVAAKNGTGATVAEWAILGQEVQNNGYGDQIEARRLDVRGAAALSGMGSFTQRRKRKMILPRFD

SEQ ID NO: 224 - protein, 1016 aa, Talaromyces variabilis
ALSPGARVNQVLRAHNSLPPSLTDNSTGSSYKTRFDGVTWDQRNWRLQSRVLDQGHYEARGSVANGYIGINVASAGPFFELDTPVDGDVINGWPLFSRRQTFAGLAGFYDLQPTTNSTNYGWLNQYGDESVISGIPHWAGLVLDLGNGDYLDATVDNSTISDYTTTYDYKAGILSWDYKWTPRQNSSSFRISYQLFANKLDINQAVVKLSITPSKSGNASVVNVIDGYSAVRTDFVKSGSDGNAIYTAVSPVGVSNVTAWVYAVLDGDKAFDLSSPSRVTGKPYIHQNESSIAQAVNVEFSAGKTVTIAKFVGAASTDAFSNPQKKAKTAALDGKKKGFEDLLRSHVSEWAQVMPDDSVDDFTLANGTLPDDSFIIEQAVTAVVNPYYLLQNTVGKNALQRVNNAPVNDWSIPVGGLSSDSYAGMIFWDADVWMQPGLVAAFPESAKRITNYRAAKYQQAIANVKTAYSSSQNETVFSPNAAIFPWTSGRYGNCTGTGPCWDYEYHLNGDIAISLVNQWVVSGDTETFQNEHFPIYNSIATVYGDLLKKNGSYYTLTNMTDPDEYANNKDAGGYTMPLIANTLIKANEFRRQFGMAENATWNEMAENVLIIRENDVTLEYTTMNNSVAVKQADVVLRTFPLDYTTNYSSSAALNDLDYYALKQSPDGPGMTYAIFSIVANEVSPSGCSAYTYAQYSYDPYARAPFFQLSEQLIDDYTTNGGTHPAYPFLTGHGGANQVVLYGYLGLRLVADEILHIDPNLPPQIPQVTYRTFYWRGWPIQAASNYTHTTIHRATTVAPLDSAEKKYAKSAISVQVGQQANSTTYKLPADGTPLTVANRKVGSTNTIKGNIAQCQSVQSVDSYQPGQYALAAVDGAASTKWQPEFAANVSSLTVSIPSGKTSVSGFYFDWAQAPPSNATVVFHNNSVSNPTFSSFGSRKGARITHIDVKLSNPYNASSNADAIVIPSGNTTNFTFSNPVPAPRFATLFVQGNQGLDKVDVQNGNGTGATVAEWAILE

SEQ ID NO: 225 - protein, 1050 aa, Aspergillus niger
LPGKNARISASLKRHAGRDVPQTALNSTNVYQTKFSGVTWDEDHWLLTTTTPDQGHYQSRGSVANGYLGINVANIGPFFELDEPVNGDVINGWPLYSRRQSFATISGFWDRQAHTNGSNFPWLSQYGDDSVISGVPHWSGLILDLGDDTYLDATVDNRTISNFKSTYDFKSGVLSWSYTWTPQGNKGSYAITYRLFAHKLYVNRAVVDMEITPLTNGNATVVNVLDGYAAVRTDFVASGQEEGAIFSAVRPWGVNNVTAYVYATLDGSDSVDLSSRRIVTDKPYVSTNSSSVAQAVDVMFTANETVRITKFVGGATTDYFLATQETAKAACLAGLADGYVKSLQSHVGEWATIMHDHSVDRFTDPATGKLPEDSHIVDSAIIAVTNTYYLLQNTAGTNAIVAAGGIPVNVDSCAPGGLTSDSYGGQIFWDADLWMQPGLVASHPESAQRFTNYRIALHYQAQANIETAFTGSKNQTSFSSSAAIYPWTSGRFGNCTATGPCWDYQYHLNGDIGLAMINQWVASGDTAWFKNYLFPIYDAAATLYSELVERNGSSWTLTNMTDPDEYANSINAGGYTMPLIAETLQNANKLRKQFGLEPNETWDEIAEDVLILRENGVTLEYTSMNGSAVVKQADIVLNTFPLTYESDNYTATNSLTDLDYYANKQSADGPAMTYAIFAIVASDVSPSGCSAFTYHQYSYAPYARGPWYQLSEQMIDDASINGGTHPAFPFLTGHGGANQVALYGYLGLRLHPDDTIYIDPNLPPQIPHITYRTFYWHGWPISAWSNYTHTTIQRDSSLAPLASADLLFSNVSIKVQVGQSTASADEATIYYLPLSGALTVPNRMIGSVNTTPGNQVQCHPVYSPDAYEPGQFPISAVDGATSTKWQPSTSDLTSLTVTLSTTAEAGAEEVSGFYFDWSQAPPENLTVIFHDSPIGNPSTVFAAAGSNSTGYRVITSMSNIVQSKPYNAISAEELNVVSIPTANTTTITLDAPVQKARYATLLIAGNQANETAGATVAEWVILGQNSTSSSSAQAKRKMSARSKATLAQLS

SEQ ID NO: 226 - protein, 1056 aa, Trichoderma reesei
TTLVDRVTKCLSRHDGSDAESHFSKNVYKTDFAGVTWDEDNWLLSTTQLKQGAFEARGSVANGYLGINVASVGPFFEVDTEEDGDVISGWPLFSRRQSFATVAGFWDAQPQMNGTNFPWLSQYGSDTAISGIPHWSGLVLDLGGGTYLDATVSNKTISHFRSTYDYKAGVLSWSYKWTPKGNKGSFDISYRLFANKLHVNQAVVDMQVTASKNVQASIVNVLDGFAAVRTDFVESGEDGSAIFAAVRPNGVANVTAYVYADITGSGGVNLSSRKIVHNKPYVHANASSIAQAVPVKFAAGRTVRVTKFVGAASSDAFKNPKQVAKKAAAAGLSNGYTKSLKAHVEEWATVMPESSVDSFADPKTGKLPADSHIVDSAIIAVTNTYYLLQNTVGKNGIKAVDGAPVNVDSISVGGLTSDSYAGQIFWDADLWMQPGLVAAHPEAAERITNYRLARYGQAKENVKTAYAGSQNETFFSASAAVFPWTSGRYGNCTATGPCWDYEYHLNGDIGISLVNQWVVNGDTKDFEKNLFPVYDSVAQLYGNLLRPNKTSWTLTNMTDPDEYANHVDAGGYTMPLIAETLQKANSFRQQFGIEQNKTWNDMASNVLVLRENGVTLEFTAMNGTAVVKQADVIMLTYPLSYGTNYSAQDALNDLDYYANKQSPDGPAMTYAFFSIVANEISPSGCSAYTYAQNAFKPYVRAPFYQISEQLIDDASVNGGTHPAYPFLTGHGGAHQVVLFGYLGLRLVPDDVIHIEPNLPPQIPYLRYRTFYWRGWPISAWSNYTHTTLSRAAGVAALEGADQRFARKPITIHAGPEQDPTAYRLPVKGSVVIPNKQIGSQQTYAGNLVQCHAASSPNDYVPGQFPIAAVDGATSTKWQPASADKVSSITVSLDKEDVGSLVSGFHFDWAQAPPVNATVIFHDEALADPATALASAHKHNSKYTTVTSLTNIELSDPYVSTKDLNAIAIPIGNTTNVTLSHPVAASRYASLLIVGNQGLDPVDVKAKNGTGATVAEWAIFGHGKEHSGKPSSHSKRRLNVRTAATLSNPRSFMRRRL

SEQ ID NO: 227 - protein, 19 aa, Saccharomyces cerevisiae
MLSLKTLLCTLLTVSSVLA

SEQ ID NO: 228 - DNA, 185 bp, Saccharomyces cerevisiae
agtgcttttaactaagaattattagtcttttctgcttattttttcatcatagtttagaacactttatattaacgaatagtttatgaatctatttaggtttaaaaattgatacagttttataagttactttttcaaagactcgtgctgtctattgcataatgcactggaaggggaaaaaaaaggtg

SEQ ID NO: 229 - protein, 555 aa, Pycnoporus sanguineus glucoamylase
QSSAVDAYVASESPIAKQGVLNNIGPNGSKAHGAKAGIVVASPSTENPDYLYTWTRDSSLVFKLLIDQFTSGDDTSLRGLIDDFTSAEAILQQVSNPSGTVSTGGLGEPKFNIDETAFTGAWGRPQRDGPALRATSIIRYANWLLDNGNTTYVSNTLWPVIQLDLDYVADNWNQSTFDLWEEVDSSSFFTTAVQHRALREGATFASRIGQSSVVSGYTTQADNLLCFLQSYWNPSGGYVTANTGGGRSGKDSNTVLTSIHTFDPAAGCDAATFQPCSDKALSNLKVYVDAFRSIYTINNGIASNAAVATGRYPEDSYMGGNPWYLTTSAVAEQLYDALYVWDQLGGLNVTSTSLAFFQQFASGLSTGTYSASSSTYATLTSAIRSFADGFLAINAKYTPADGGLAEQYSRNDGTPLSAVDLTWSYAAALTAFAAREGKTYGSWGAAGLTVPASCSGGGGATVAVTFNVQATTVFGENIYITGSVAALQNWSPDNALILSAANYPTWSITVNLPANTVVQYKYIRKFNGQVTWESDPNNQITTPSGGSFTQNDVWR

SEQ ID NO: 230 - protein, 599 aa, Trichoderma reesei
SVDDFISTETPIALNNLLCNVGPDGCRAFGTSAGAVIASPSTIDPDYYYMWTRDSALVFKNLIDRFTETYDAGLQRRIEQYITAQVTLQGLSNPSGSLADGSGLGEPKFELTLKPFTGNWGRPQRDGPALRAIALIGYSKWLINNNYQSTVSNVIWPIVRNDLNYVAQYWNQTGFDLWEEVNGSSFFTVANQHRALVEGATLAATLGQSGSAYSSVAPQVLCFLQRFWVSSGGYVDSNINTNEGRTGKDVNSVLTSIHTFDPNLGCDAGTFQPCSDKALSNLKVVVDSFRSIYGVNKGIPAGAAVAIGRYAEDVYYNGNPWYLATFAAAEQLYDAIYVWKKTGSITVTATSLAFFQELVPGVTAGTYSSSSSTFTNIINAVSTYADGFLSEAAKYVPADGSLAEQFDRNSGTPLSAVHLTWSYASFLTAAARRAGIVPPSWANSSASTIPSTCSGASVVGSYSRPTATSFPPSQTPKPGVPSGTPYTPLPCATPTSVAVTFHELVSTQFGHTVKVAGNAAALGNWSTSAAVALDAVNYRDNHPLWIGTVNLEAGDVVEYKYIIVGQDGSVTWESDPNHTYTVPAVACVTQVVKEDTWQS

SEQ ID NO: 231 - protein, 633 aa, Bacillus amyloliquefaciens
GPAAANAETANKSNKVTASSVKNGTILHAWNWSFNTLTQNMKDIRDAGYAAIQTSPINQVKEGNQGDKSMRNWYWLYQPTSYQIGNRYLGTEQEFKDMCAAAEKYGVKVIVDAVINHTTSDYGAISDEIKRIPNWTHGNTQIKNWSDRWDVTQNSLLGLYDWNTQNTEVQVYLKRFLERALNDGADGFRYDAAKHIELPDDGNYGSQFWPNITNTSAEFQYGEILQDSASRDTAYANYMNVTASNYGHSIRSALKNRNLSVSNISHYASDVSADKLVTWVESHDTYANDDEESTWMSDDDIRLGWAVIGSRSGSTPLFFSRPEGGGNGVRFPGKSQIGDRGSALFKDQAITAVNTFHNVMAGQPEELSNPNGNNQVFMNQRGSKGVVLANAGSSSVTINTSAKLPDGRYDNRAGAGSFQVANGKLTGTINARSAAVLYPDDIGNAPHVFLENYQTGAVHSFNDQLTVTLRANAKTTKAVYQINNGQQTAFKDGDRLTIGKGDPIGTTYNIKLTGTNGEGAARTQEYTFVKKDPSQTNIIGYQNPDHWGQVNAYIYKHDGGRAIELTGSWPGKAMTKNANGMYTLTLPENTDTANAKVIFNNGSAQVPGQNQPGFDYVQNGLYNNSGLNGYLPH

SEQ ID NO: 232 - DNA, 700 bp, Saccharomyces cerevisiae
cacccatgaaccacacggttagtccaaaaggggcagttcagattccagatgcgggaattagcttgctgccaccctcacctcactaacgctgcggtgtgcggatacttcatgctatttatagacgcgcgtgtcggaatcagcacgcgcaagaaccaaatgggaaaatcggaatgggtccagaactgctttgagtgctggctattggcgtctgatttccgttttgggaatcctttgccgcgcgcccctctcaaaactccgcacaagtcccagaaagcgggaaagaaataaaacgccaccaaaaaaaaaaaaataaaagccaatcctcgaagcgtgggtggtaggccctggattatcccgtacaagtatttctcaggagtaaaaaaaccgtttgttttggaatttcccatttcgcggccacctacgccgctatctttgcaacaactatctgcgataactcagcaaattttgcatattcgtgttgcagtattgcgataatgggagtcttacttccaacataacggcagaaagaaatgtgagaaaattttgcatcctttgcctccgttcaagtatataaagtcggcatgcttgataatctttctttccatcctacattgttctaattattcttattctcctttattctttcctaacataccaagaaattaatcttctgtcattcgcttaaacactatatcaataa

SEQ ID NO: 233 - DNA, 240 bp, Saccharomyces cerevisiae
tcagtactgacaataaaaagattcttgttttcaagaacttgtcatttgtatagtttttttatattgtagttgttctattttaatcaaatgttagcgtgatttatattttttttcgcctcgacatcatctgcccagatgcgaagttaagtgcgcagaaagtaatatcatgcgtcaatcgtatgtgaatgctggtcgctatactgctgtcgattcgatactaacgccgccatccagtgtcga

SEQ ID NO: 234 - protein, 18 aa, Saccharomyces cerevisiae
MQLLRCFSIFSVIASVLA

SEQ ID NO: 235 - protein, 274 aa, Thermomyces lanuginosus
EVSQDLFNQFNLFAQYSAAAYCGKNNDAPAGTNITCTGNACPEVEKADATFLYSFEDSGVGDVTGFLALDNTNKLIVLSFRGSRSIENWIANLNFWLKKINDICSGCRGHDGFTSSWRSVADTLRQKVEDAVREHPDYRVVFTGHSLGGALATVAGADLRGNGYDIDVFSYGAPRVGNRAFAEFLTVQTGGTLYRITHTNDIVPRLPPREFGYSHSSPEYWIKSGTLVPVTRNDIVKIEGIDATGGNNQPNIPDIPAHLWYFQATDACNAGGFS

SEQ ID NO: 236 - protein, 277 aa, Thermomyces lanuginosus
APAPVLRRDVSSSVLSELDLFAQYSAAAYCSSNIGSPGTKLTCSVGNCPRVEAADTETLIEFNESSSFGDVTGYIAVDRTNSLLVLAFRGSSTVSNWEADLDFPLTDASSLCSGCEIHSGFWAAWQTVQASITSTLESAIASYPGYTLVFTGHSYGAALAAIAATTLRNAGYTIQLYDYGQPRLGNLALAQYITAQTQGANYRVTHTDDIVPKLPPELFGYHHFSPEYWITSGDNVTVTTSDVQVVTGIDSTAGNDGTLLDSTSAHDWYIVYIDGCD

SEQ ID NO: 237 - protein, 594 aa, Penicillium emersonii
SAPYDKRDLAQEIWDDIKNAVDCAGCQVVLTALKGVADLGTTALVDVLTEVCNISGKEDSDVCSGIISREGPVLDYVLQHLDIGSHTSQVICASAFGLCQYPEVRPYNLTFPKPKPNTTRPEPSGESPIQVVHFSDTHVDLSYETGSNYNCTKPICCRPYTAEDAPGNTTTPCGPYGNTKCDAPLSLEESMFAAIKALNPQPAFSIYTGDVVAHDIWLVDQNEVIEDLNATYDRMAGLGLVYAAIGNHDTAPVNDLPTSNIPSEYSANWTYEALSYDFTMLTQSASAQTAANYGSYSAIYPGSYGTDLRVISYNSIFYYVDNFWAYQDPMEFDPDGQLAWLINELQEAETAGQRVWIIAHVPTGTSDHFHDYSHYFDQIVQRYEATIAALFYGHTHIDQFQISYSNYSNRAFDTATAIGYIMPSLTPTSGPPTFRVYDVDPKTFAVLDFTNYIANISDPAFQSGPSWQKYYSAKETYGSLLSPPVTDPTAELTPAFWHNVTVAFEQDNATFQEYWARQTRGYDVSSCTGSCITQAICGLRAGDAQYNCVTPTPGFNFAKRDTSNPKQALSHVEKCEGSGLLGLLRRMVADSKSS

SEQ ID NO: 238 - protein, 259 aa, Bacillus thuringiensis
HENDGGSKIKIIHRWSAEDKHKEGVNSHLWIVNRAIDIMSRNTTLVKQDRVAQLNEWRTELENGIYAADYENPYYDNSTFASHFYDPDNGKTYIPFAKQAKETGAKYFKLAGESYKNKDMKQAFFYLGLSLHYLGDVNQPMHAANFTNLSYPQGFHSKYENFVDTIKDNYKVTDGNGYWNWKGTNPEDWIHGAAVVAKQDYSGIVNDNTKDWFVKAAVSQEYADKWRAEVTPMTGKRLMDAQRVTAGYIQLWFDTYGDR

SEQ ID NO: 239 - protein, 297 aa, Pseudomonas sp.
QESPAFIDPASWNTPFNGIAQVACHNCYEKQYANTFSSVLDSVRTLELDFWDQRDAVSGGSPHHWFVRHNPGTLFQSGNDNNCTGDGTGKNDLEACLNDVKNWSDKHPGHFPITLILDKKQGWSKESSGRTPKDFDELVARVFQGKLFTPQDLATHIGSGAGALQGNLKGKSWPTANDLQGKVLLVLNHSENQKLSQYAEARTSKAKVFISPVTNGQNDISGKVSGMSSQSSGYVAMNNMGKGDKSWAKQAFAYSHIGRVWGDDEVSFAQHINQKINLSAYYRFAAQSAGGYRIRPF

SEQ ID NO: 240 - protein, 625 aa, Kionochaeta sp.
AVNPADVLSVVEKRVDPASGLEVRSIWDTIWNDIKSAADCTACEAVLTLLKGVAAFGDNFFVEVLTEICDLSGAEDDDVCSGVLSLEGPIIANDIRKMSIGSKTSELFCITFLGLCSYPAVDAFTVPFPTAKSAATRPVSSGKDPIYVVHYSDIHIDPFYVAGSASNCTKPICCRDYTSASSPGNNNSPAGPYGDHNCDVPISLEDSMYAAIKKLVPDAAFGIFTGDIVDHAVWNTSESQNIIDMNDAYTRMKNSGMLPTIFATAGNHEASPVNSFPPPAIGNESQWVYDTLASDWSQWIGTSGASSVESIGAYSVQYGSTKLRVISLNTNMYYIENFYLYEPTMEQDPAGQFAWLVSELSAAEAAGERVWIIGHMPLGLSDAFHDPSNYFDQIVNRYEATIAAMFFGHTHEDHFQISYSDYNARTAANARAVSYIMPSLTPTSGHPTFRVYTVDPETFGVLDATTYYADMSQPTYQTAGPAWSVYYSAKAAYGGLVDPPVAADDAAAELTPAFWHNVTAALAADPASFDAYYARKTRGWDVAACAGACAAAEVCALRAARAQDNCVVPTPGVHFSKRADEGTLAHHRDECGVSVARNSLSSLVVQREALEHLEGRLSEKRRMAV

SEQ ID NO: 241 - protein, 613 aa, Mariannaea pinicola
QEVTHDLAGIKRSLESRDWVEDLWDKFESDATCAGCESLVLVLKGLAAISDQAFIDVLQEICKISGAEDDDVCDGSIQLEGPVIASGLRSMAIGSRTSKEFCTTFLGLCAYPAVQQWSVPFSSSKSSKTRPSSSGKDPIKVVHYSDIHIDPLYVGGSNSNCTKPICCRSYTKADQPGNNKYPAGPNGDHNCDSPVSLEKSMYNAIKEIVPDAAFTIFTGDIVDHAVWNTSQSYNTEQITNAYGLMSDNLGTIYGTAGNHEAHPANAFQPNSVGNVSQWVYDLLSGLWSQWISTEAKADSEKLGAYSTKYPGGNLRIISLNTNMYYRENYWLYRKTMIQDPSNQISWLVNELEAAETAGERVYIIGHMPLGDSNSFHDQSNYLDQVINRYSATISAMFFGHTHDDQFQISYSNWSNRNFSNALVTSYIGPSLTPTAGMPAFRVYDVDPVTFGILDSTTYIADMTDSAFQTTGPVWKKYYSAKEVYGSLLSPAVTDSSAELTAAFWHNVTTLFEADNTAFEAFLSRKSRGWKSESCTGTCKANEICQLRAARSENNCYTPSLGISFNKRSLNPVEERDECGISVTRATVSAMGVRKDVLRLLKKRFIEKAGEVRG

SEQ ID NO: 242 - protein, 259 aa, Fictibacillus macauensis
HENEGGNKVRVIQYWSAEDPHHEDTNTHLWIVRHAMEIMANNKDVVKPGEVEQLKQWQSDLEQGIYDADHANPYYDNATFASHFYDPDTGKSYIPLAAHAKTTSVKYFKRAGEAYQKGDHKQAFYNLGLALHYIGDLNQPMHAANFTNLSYPQGFHSKYENYVDSFKEDYAVKDGEGYWHWKGTNPEDWLHGTAVAAKKDYPDIVNDTTKAWFVKAAVSNSYAAKWRAAVVPATGKRLTEAQRILAGYMQLWFDTYVNK

SEQ ID NO: 243 - DNA, 250 bp, Saccharomyces cerevisiae
acagaagacgggagacactagcacacaactttaccaggcaaggtatttgacgctagcatgtgtccaattcagtgtcatttatgattttttgtagtaggatataaatatatacagcgctccaaatagtgcggttgccccaaaaacaccacggaacctcatctgttctcgtactttgttgtgacaaagtagctcactgccttattatcacattttcattatgcaacgcttcggaaaatacgatgttgaaaat

SEQ ID NO: 244 - protein, 561 aa, Punctularia strigosozonata
SSKSVSAYISSESPIAHSKLLDNIGPDGAKAPGAFPGVVVASPSTDNPNYYYSWIRDSSLVFKTLIDDYVNGKNTSKSLRSLIDDFVTASSVFQQTPNPSGNVSTGGLGEPKFYVNETAFLDSWGRPQRDGPALRSTALITYANYLLDNDNTTWVKDTLWPIIELDVNYVSDFWNYTTFDLWEEVASSSFFTTAVQHRALRQASKLAKTLDKTDNIDSWNTQADNVLCFLQSYWNGSAIIANTGGGRSGIDANTVLASIHTFDSSAGCDATTFQPCSDKALSNLKVYVDAFRSIYEINSGIDPNAAVATGRYPEDVFYDGNPWYLATAAVAEQLYDALYVWNTTGSLEITDISLPFFQQFDSDVKTGTYSDDDTFDSLISSIQSFADGFLEIHAKYTPDDGALSEEFSKTDGSQTSAADLTWSYAAALTAFDARSRDAAVKWGAKGLQVPDGTCKTNEGGDDGLGVPVTFLVKDAETVEGQSVYITGSIATLKSWSPDDALLMSPSDYPTWTLTVNLSASESVQYKYIKKDTAGTVIWESDPNNSLLVPSGGSVTTDDTWR

SEQ ID NO: 245 - protein, 551 aa, Fibroporia radiculosa
QSTSVSAYIASESPVAKAGVLANIGTEGSLSSGAYSGVVIASPSTVNPDYLYTWVRDSSLTFQALIDQYVYGEDPTLRSLIDEFITAESILQQTTNPSGTVSTGGLGEPKFNINETAFTGPWGRPQRDGPALRSTAIITYATYLWNSGNTSYVSDSLWPIIELDLNYIATYWNFSTFDLWEEIDSSSFWTTAVQHRALRQGITFANLIGQTSPVSNYETQAGDILCFLQTYWNPTGNYMTANTGGGRSGKDSNTVLASVHTFDPDAGCDSTTFQPCSDKALSNLKVYVDSFRSLYAINDGIASDAAVATGRYPEDVYYGGNPWYLCTFAVAEQLYDALIVWSSQGYLEITDLSLAFFQQFDSDVGTGTYDSGSSTYSTLTSAIRTFADGFVLTNAKYTPTNGSLSEEYTSADGTPISAYDLTWSYASALTVFAAEAGTTYGSWGAAGLTVPSTCTSGVAVTFEVDYDTEYGENVYITGSVNALENWSATNALIMSAADYPTWSITVYLPPSTTIQYKYLTQYNGEVTWEDDPNNEITTPASGSMTQVDSWH

SEQ ID NO: 246 - protein, 552 aa, Wolfiporia cocos
QTTSVTSYIASESPIAKAGVLANIGADGSLSSGAYSGIVIASPSTVNPNYLYTWTRDSSLTFMELINQYIYGEDDTLRTLIDEFVSAEATLQQVTNPSGTVSTGGLGEPKFNINETAFTGPWGRPQRDGPALRATAIMAYATYLYENGNTSYVTDTLWPIIELDLGYVAEYWNESTFDLWEEIDSSSFFTTAVQHRALRAGVTFANLIGETSDVSNYQENADDLLCFLQSYWNPTGSYVTANTGGGRSGKDANTLLASIHTFDPDAGCNATTFQPCSDKALSNHKVYVDSFRSLYAINDDISSDAAVATGRYPEDVYYNGNPWYLCTLAAAEQLYDSLIVWKAQGYIEVTSLSLAFFQQFDASVSAGTYDSSSDTYTTLLDAVQTYADGFVLMVAQYTPANGSLSEQYAKADGSPTSAYDLTWSFAAALTAFAARDGKTYGSWGAADLSSTCSGSTDTVAVTFEVQYDTQYGENLYITGSVSQLEDWSADDALIMSSADYPTWSITVDLPPSTLIQYKYLTKYNGDVTWEDDPNNEITTPASGSYTQVDSWH

SEQ ID NO: 247 - protein, 591 aa, Talaromyces emersonii
ATGSLDSFLATETPIALQGVLNNIGPNGADVAGASAGIVVASPSRSDPNYFYSWTRDAALTAKYLVDAFNRGNKDLEQTIQQYISAQAKVQTISNPSGDLSTGGLGEPKFNVNETAFTGPWGRPQRDGPALRATALIAYANYLIDNGEASTADEIIWPIVQNDLSYITQYWNSSTFDLWEEVEGSSFFTTAVQHRALVEGNALATRLNHTCSNCVSQAPQVLCFLQSYWTGSYVLANFGGSGRSGKDVNSILGSIHTFDPAGGCDDSTFQPCSARALANHKVVTDSFRSIYAINSGIAEGSAVAVGRYPEDVYQGGNPWYLATAAAAEQLYDAIYQWKKIGSISITDVSLPFFQDIYPSAAVGTYNSGSTTFNDIISAVQTYGDGYLSIVEKYTPSDGSLTEQFSRTDGTPLSASALTWSYASLLTASARRQSVVPASWGESSASSVLAVCSATSATGPYSTATNTVWPSSGSGSSTTTSSAPCTTPTSVAVTFDEIVSTSYGETIYLAGSIPELGNWSTASAIPLRADAYTNSNPLWYVTVNLPPGTSFEYKFFKNQTDGTIVWEDDPNRSYTVPAYCGQTTAILDDSWQ

SEQ ID NO: 248 - protein, 578 aa, Rhizopus microsporus
VPTSAAVQVESYNYDGTTFSGRIFVKNIAYSKVVTVIYSDGSDNWNNNNNKVSAAYSEAISGSNYEYWTFSAKLSGIKQFYVKYEVSGSTYYDNNGTKNYQVQATSATSTTATATTTTATGTTTTSTGPTSTASVSFPTGNSTISSWIKNQEEISRFAMLRNINPPGSATGFIAASLSTAGPDYYYSWTRDSALTANVIAYEYNTTFTGNTTLLKYLKDYVTFSVKSQSVSTVCNCLGEPKFNADGSSFTGPWGRPQNDGPAERAVTFMLIADSYLTQTKDASYVTGTLKPAIFKDLDYVVSVWSNGCYDLWEEVNGVHFYTLMVMRKGLILGADFAARNGDSSRASTYKQTASTMESKISSFWSDSNNYVQVSQSVTAGVSKKGLDVSTLLAANIGSLPDGFFTPGSEKILATAVALENAFASLYPINSNLPSYLGNSIGRYPEDTYNGNGNSQGNPWFLAVNAYAELYYRAIKEWISNGKVTVSNISLPFFKKFDSSATSGKTYTAGTSDFNNLAQNIALGADRFLSTVKFHAYTNGSLSEEYDRSTGMSTGARDLTWSHASLITVAYAKAGSPAA

SEQ ID NO: 249 - protein, 579 aa, Rhizopus delemar
ASIPSSASVQLDSYNYDGSTFSGKIYVKNIAYSKKVTVIYADGSDNWNNNGNTIAASYSAPISGSNYEYWTFSASINGIKEFYIKYEVSGKTYYDNNNSANYQVSTSKPTTTTATATTTTAPSTSTTTPPSSSEPATFPTGNSTISSWIKKQEGISRFAMLRNINPPGSATGFIAASLSTAGPDYYYAWTRDAALTSNVIVYEYNTTLSGNKTILNVLKDYVTFSVKTQSTSTVCNCLGEPKFNPDGSGYTGAWGRPQNDGPAERATTFILFADSYLTQTKDASYVTGTLKPAIFKDLDYVVNVWSNGCFDLWEEVNGVHFYTLMVMRKGLLLGADFAKRNGDSTRASTYSSTASTIANKISSFWVSSNNWIQVSQSVTGGVSKKGLDVSTLLAANLGSVDDGFFTPGSEKILATAVAVEDSFASLYPINKNLPSYLGNSIGRYPEDTYNGNGNSQGNPWFLAVTGYAELYYRAIKEWIGNGGVTVSSISLPFFKKFDSSATSGKKYTVGTSDFNNLAQNIALAADRFLSTVQLHAHNNGSLAEEFDRTTGLSTGARDLTWSHASLITASYAKAGAPAA

SEQ ID NO: 250 - protein, 579 aa, Rhizopus oryzae
ASIPSSASVQLDSYNYDGSTFSGKIYVKNIAYSKKVTVVYADGSDNWNNNGNTIAASFSGPISGSNYEYWTFSASVKGIKEFYIKYEVSGKTYYDNNNSANYQVSTSKPTTTTAATTTTTAPSTSTTTRPSSSEPATFPTGNSTISSWIKKQEDISRFAMLRNINPPGSATGFIAASLSTAGPDYYYAWTRDAALTSNVIVYEYNTTLSGNKTILNVLKDYVTFSVKTQSTSTVCNCLGEPKFNPDGSGYTGAWGRPQNDGPAERATTFVLFADSYLTQTKDASYVTGTLKPAIFKDLDYVVNVWSNGCFDLWEEVNGVHFYTLMVMRKGLLLGADFAKRNGDSTRASTYSSTASTIANKISSFWVSSNNWVQVSQSVTGGVSKKGLDVSTLLAANLGSVDDGFFTPGSEKILATAVAVEDSFASLYPINKNLPSYLGNAIGRYPEDTYNGNGNSQGNPWFLAVTGYAELYYRAIKEWISNGGVTVSSISLPFFKKFDSSATSGKKYTVGTSDFNNLAQNIALAADRFLSTVQLHAPNNGSLAEEFDRTTGFSTGARDLTWSHASLITASYAKAGAPAA

SEQ ID NO: 251 - protein, 435 aa, Thermococcus gammatolerans
KYSELEQGGVIMQAFYWDVPAGGIWWDTIRQKIPEWYDAGISAIWIPPASKGMGGAYSMGYDPYDYFDLGEFYQKGTVETRFGSKEELVNMISTAHRYGIKVIADIVINHRAGGDLEWNPYVGDYTWTDFSQVASGKYKAHYMDFHPNNYSTSDEGTFGGFPDIDHLVPFNKYWLWASDESYAAYLRSIGVDAWRFDYVKGYGAWVVKDWLSWWGGWAVGEYWDTDVNALLNWAYDSGAKVFDFPLYYKMDEAFDNKNIPALVYAIQNGGTVVSRDPFKAVTFVANHDTNIIWNKYPAYAFILTYEGQPVIFYRDYEEWLNKDKLNNLIWIHEHLAGGSTKILYYDDDELIFMREGYGDRPGLITYINLGSGWAERWVNVGSKFAGYTIHEYTGNLGGWVDRYVYYNGWVKLTAPPHDPANGYYGYSVWSYAGVG

SEQ ID NO: 252 - protein, 432 aa, Thermococcus thioreducens
ETLENGGVIMQAFYWDVPMGGIWWDTIAQKIPDWASAGISAIWIPPASKGMSGGYSMGYDPYDYFDLGEYYQKGTVETRFGSKQELVNMINTAHAYGMKVIADIVINHRAGGDLEWNPFVNDYTWTDFSKVASGKYTANYLDFHPNELHAGDSGTFGGYPDICHDKSWDQYWLWASNESYAAYLRSIGIDAWRFDYVKGYAPWVVKDWLNWWGGWAVGEYWDTNVDALLNWAYASGAKVFDFPLYYKMDEAFDNNNIPALVDALRYGQTVVSRDPFKAVTFVANHDTDIIWNKYPAYAFILTYEGQPMIFYRDYEEWLNKDRLKNLIWIHDHLAGGSTDIVYYDSDELIFVRNGYGSKPGLITYINLGSSKAGRWVYVPKFAGSCIHEYTGNLGGWVDKWVDSSGWVYLEAPAHDPANGQYGYSVWSYCGVG

SEQ ID NO: 253 - protein, 440 aa, Thermococcus eurythermalis
QPAGAAKYLELEEGGVIMQAFYWDVPSGGIWWDTIRQKIPEWYDAGISAIWIPPASKGMGGAYSMGYDPYDFFDLGEYDQKGTVETRFGSKQELVNMINTAHAYGIKVIADIVINHRAGGDLEWNPFVNDYTWTDFSKVASGKYTANYLDFHPNEVKCCDEGTFGGFPDIAHEKSWDQYWLWASNESYAAYLRSIGVDAWRFDYVKGYGAWVVKDWLDWWGGWAVGEYWDTNVDALLNWAYSSDAKVFDFPLYYKMDAAFDNKNIPALVEALKNGGTVVSRDPFKAVTFVANHDTDIIWNKYPAYAFILTYEGQPTIFYRDYEEWLNKDRLKNLIWIHDHLAGGSTDIVYYDNDELIFVRNGYGDKPGLITYINLGSSKAGRWVYVPKFAGACIHEYTGNLGGWVDKWVDSSGWVYLEAPAHDPANGYYGYSVWSYCGVG

SEQ ID NO: 254 - protein, 432 aa, Thermococcus hydrothermalis
ETLENGGVIMQAFYWDVPGGGIWWDTIAQKIPDWASAGISAIWIPPASKGMSGGYSMGYDPYDFFDLGEYYQKGSVETRFGSKEELVNMINTAHAHNMKVIADIVINHRAGGDLEWNPFTNSYTWTDFSKVASGKYTANYLDFHPNELHAGDSGTFGGYPDICHDKSWDQHWLWASNESYAAYLRSIGIDAWRFDYVKGYAPWVVKNWLNRWGGWAVGEYWDTNVDALLSWAYDSGAKVFDFPLYYKMDEAFDNNNIPALVDALKNGGTVVSRDPFKAVTFVANHDTNIIWNKYPAYAFILTYEGQPAIFYRDYEEWLNKDRLRNLIWIHDHLAGGSTDIIYYDSDELIFVRNGYGDKPGLITYINLGSSKAGRWVYVPKFAGSCIHEYTGNLGGWIDKWVDSSGRVYLEAPAHDPANGQYGYSVWSYCGVG

SEQ ID NO: 255 - protein, 434 aa, Pyrococcus furiosus
KYLELEEGGVIMQAFYWDVPGGGIWWDHIRSKIPEWYEAGISAIWLPPPSKGMSGGYSMGYDPYDYFDLGEYYQKGTVETRFGSKEELVRLIQTAHAYGIKVIADVVINHRAGGDLEWNPFVGDYTWTDFSKVASGKYTANYLDFHPNELHCCDEGTFGGFPDICHHKEWDQYWLWKSNESYAAYLRSIGFDGWRFDYVKGYGAWVVRDWLNWWGGWAVGEYWDTNVDALLSWAYESGAKVFDFPLYYKMDEAFDNNNIPALVYALQNGQTVVSRDPFKAVTFVANHDTDIIWNKYPAYAFILTYEGQPVIFYRDFEEWLNKDKLINLIWIHDHLAGGSTTIVYYDNDELIFVRNGDSRRPGLITYINLSPNWVGRWVYVPKFAGACIHEYTGNLGGWVDKRVDSSGWVYLEAPPHDPANGYYGYSVWSYCGVG

SEQ ID NO: 256 - protein, 626 aa, Bacillus amyloliquefaciens
ETANKSNKVTASSVKNGTILHAWNWSFNTLTQNMKDIRDAGYAAIQTSPINQVKEGNQGDKSMRNWYWLYQPTSYQIGNRYLGTEQEFKDMCAAAEKYGVKVIVDAVINHTTSDYGAISDEIKRIPNWTHGNTQIKNWSDRWDVTQNSLLGLYDWNTQNTEVQAYLKRFLERALNDGADGFRYDAAKHIELPDDGNYGSQFWPNITNTSAEFQYGEILQDSASRDTAYANYMNVTASNYGHSIRSALKNRNLSVSNISHYASDVSADKLVTWVESHDTYANDDEESTWMSDDDIRLGWAVIGSRSGSTPLFFSRPEGGGNGVRFPGKSQIGDRGSALFKDQAITAVNTFHNVMAGQPEELSNPNGNNQIFMNQRGSKGVVLANAGSSSVTINTSAKLPDGRYDNRAGAGSFQVANGKLTGTINARSAAVLYPDDIGNAPHVFLENYQTGAVHSFNDQLTVTLRANAKTTKAVYQINNGQQTAFKDGDRLTIGKGDPIGTTYNIKLTGTNGEGAARTQEYKFVKKDPSQTNIIGYQNPDHWGQVNAYIYKHDGGRAIELTGSWPGKAMTKNADGMYTLTLPENADTANAKVIFNNGSAQVPGQNQPGFDYVQNGLYNNSGLNGYLPH

SEQ ID NO: 257 - protein, 510 aa, Mucuna pruriens
MEPPSLSKTNDTTKPSALSVEEASQAQPSPLRKMFAVASIAAGIQFGWALQLSLLTPYVQLLGVPHAWASFIWLCGPISGLVVQPIVGYYSDRCTSRYGRRRPFILGGAVAVAVAVFLIGYAADIGHAAGDDITKKTRPRAVSIFVIGFWILDVANNMLQGPCRAFLADLAAGDHKKTRIANGFFSFFMAVGNVLGYAAGSYSRLHRIFPFTETKACDVFCANLKSCFFFSILLLLVLATVALIYVKDKPVAARAVMDDDAQPSCFFQLFGALKELKKPMWMLMLVTAVNWIGWFPYFLFDTDWMGREVYGGTAGEEAYAAGVRAGSLGLMINAVVLGFMSLAVEPLGRMVGGVKRLWGIVNFILAIGFGITVVITKVAEHERRLNPALVGHPSQAVKVGSMVFFAVLGVPLAITFSVPFALASIYCSTSGAGQGLSLGVLNLAIVVPQMVVSALSGPWDALFGGGNLPAFMVGAVAAALSAIMAIILLPTPKPADEAKAASSIATGGFH

SEQ ID NO: 258 - protein, 492 aa, Penicillium brevicompactum
LFGFDVSSMSAWIGVDTYKDYFGSPNSNLQGGITASMSAGSFAGSIAAGWLSDILGRRYALMVASLVWIVGAMVQCSAQNVAHLVAGRVVSGLAVGVTSSQVCVYLSELAPARIRGRVVGIQQWAIEWGILIMYLIAYGCVVGVSGPAAFRICWGVQAVPGLILFIALFFFPESPRWLASKERWEEALDTLAIIHANGDRHDPAVQVEFEEVQEAVRVAHESQDVSFLALFGPRVWKRTMCGMSVQMWQQLLGGNVAMYYVVYIFEMAGLSGNTTLWSSAIQYVIFLVTTGVMLPFIDRVGRRNLLLIGSVTCMVVHFIIAGVMASRGNPVSNVNGDYNLTWEIKGSSGMAVIAFSYIFTGIYGLTWAPTAWVYASEVFPLKYRAKGVGVSAATNWIFNFALAYFVAPAFHNIQWKTYIIFGVFCCVMTFHVFLMYPETVGRSLEEIDLVFETDVKPWQTHKIGDLFGEEVERRKEDGPKKEVIGADHQEVV

SEQ ID NO: 259 - protein, 541 aa, Saccharomyces cerevisiae
MSEFATSGVESGSQQTSIHSTPIVQKLETDESPIQTKSEYTNAELPAKPIAAYWTVICLCLMIAFGGFVFGWDTGTISGFVNQTDFKRRFGQMKSDGTYYLSDVRTGLIVGIFNIGCAIGGLTLGRLGDMYGRRIGLMCVVLVYIVGIVIQIASSDKWYQYFIGRIISGMGVGGIAVLSPTLISETAPKHIRGTCVSFYQLMITLGIFLGYCTNYGTKDYSNSVQWRVPLGLNFAFAIFMIAGMLMVPESPRFLVEKGRYEDAKRSLAKSNKVTIEDPSIVAEMDTIMANVETERLAGNASWGELFSNKGAILPRVIMGIMIQSLQQLTGNNYFFYYGTTIFNAVGMKDSFQTSIVLGIVNFASTFVALYTVDKFGRRKCLLGGSASMAICFVIFSTVGVTSLYPNGKDQPSSKAAGNVMIVFTCLFIFFFAISWAPIAYVIVAESYPLRVKNRAMAIAVGANWIWGFLIGFFTPFITSAIGFSYGYVFMGCLVFSFFYVFFFVCETKGLTLEEVNEMYVEGVKPWKSGSWISKEKRVSEE

SEQ ID NO: 260 - protein, 524 aa, Metschnikowia sp
MSQDELHTKSGVETPINDSLLEEKHDVTPLAALPEKSFKDYISISIFCLFVAFGGFVFGFDTGTISGFVNMSDFKTRFGEMNAQGEYYLSNVRTGLMVSIFNVGCAVGGIFLCKIADVYGRRIGLMFSMVVYVVGIIIQIASTTKWYQYFIGRLIAGLAVGTVSVISPLFISEVAPKQLRGTLVCCFQLCITLGIFLGYCTTYGTKTYTDSRQWRIPLGICFAWALFLVAGMLNMPESPRYLVEKSRIDDARKSIARSNKVSEEDPAVYTEVQLIQAGIDREALAGSATWMELVTGKPKIFRRVIMGVMLQSLQQLTGDNYFFYYGTTIFKAVGLQDSFQTSIILGIVNFASTFVGIYAIERMGRRLCLLTGSACMFVCFIIYSLIGTQHLYKNGFSNEPSNTYKPSGNAMIFITCLYIFFFASTWAGGVYCIVSESYPLRIRSKAMSVATAANWMWGFLISFFTPFITSAIHFYYGFVFTGCLAFSFFYVYFFVVETKGLSLEEVDILYASGTLPWKSSGWVP

SEQ ID NO: 261 - protein, 548 aa, Metschnikowia sp
MSAEQEQQVSGTSATIDGLASLKQEKTAEEEDAFKPKPATAYFFISFLCGLVAFGGYVFGFDTGTISGFVNMDDYLMRFGQQHADGTYYLSNVRTGLIVSIFNIGCAVGGLALSKVGDIWGRRIGIMVAMIIYMVGIIIQIASQDKWYQYFIGRLITGLGVGTTSVLSPLFISESAPKHLRGTLVCCFQLMVTLGIFLGYCTTYGTKNYTDSRQWRIPLGLCFAWALLLISGMVFMPESPRFLIERQRFDEAKASVAKSNQVSTEDPAVYTEVELIQAGIDREALAGSAGWKELITGKPKMLQRVILGMMLQSIQQLTGNNYFFYYGTTIFKAVGMSDSFQTSIVLGIVNFASTFVGIWAIERMGRRSCLLVGSACMSVCFLIYSILGSVNLYIDGYENTPSNTRKPTGNAMIFITCLFIFFFASTWAGGVYSIVSETYPLRIRSKGMAVATAANWMWGFLISFFTPFITSAIHFYYGFVFTGCLIFSFFYVFFFVRETKGLSLEEVDELYATDLPPWKTAGWTPPSAEDMAHTTGFAEAAKPTNKHV

SEQ ID NO: 262 - protein, 366 aa, Planifilum fimeticola
MTSEHKKYKQVKEAIKAAILEGKIAPHQKISSENELVREFQVSRHTVRQAIGELVSEGWLYRQQGRGTFCADREKQSASRDNKTIAIITTYISDYIFPSIIRGAESYLSSKGYSVLLASTNNQIEQEARCLQNILSKQIEGMIVEPTKSAISNPNLSYYLNMELNRIPYVMINACYPELSPLSITVNDEMGGYIATEHLIQLGHRRIVGIFKRDDLQGVQRMKGFIRAHRAFQVPIRPGMIISFDTEEKFSKPKKVIRQMLSSNSERPTAIFCYNDEIAVQLFDVIRDLNLKVPEDISIVGFDDSHLAEATEIKLTTVKHPKITMGEVAAKLILEMIESKKSMSDMESIVYTPELVVRKSTASVKH

SEQ ID NO: 263 - protein, 559 aa, Candida boidinii
MSFITNSWNKFRTYTAPEKMLVETYLTGKKLTYSVVALSALSIFFFGYDQGLMSGVNASPDYVDHMKFGYSLDDGTVIVTDSVKQGGIVAIYYFGTLWGALFGGIVSDDIGRIKSIALGAVIAIVGAALQCSAQQTAWMCGARFVNGLGTGVLNAVVPVYTSETAESTSRGAYLAIEFTLNIFGVVVAYWLEFGLSFIDGGFSAFRWRFPIAFQILFLLVLLAIVWFFPESPRWLVKNGDQARARSLLVKMRGEEDGDREFNEIVAALSYEEDSALSSNYLSMFFDWYRGSEEQVAKAKKLHIARRVQLCVWFQIIQEWIGIAGITVYQIDIFSQAGFDSRKSQWLSGLNNIFYMFSTLISVFTLDKWGRRFTCYWGAVGQGIALFLAGGFSKAQQNHPNNKSFGAAAAAFVFIYTSVFGATWLEVPWMYPAEVFPLEVRAQGNAWGVFGWSIGNGWLTLLCPVMFNSIHERTLYIFGGCNFLGIVLVYFFIPETANRSLEDIDFLFSSDSWLASKCEAEFIRLTAGRELPSNTIEDMKNDVDHVESVKADTSSNENVV

SEQ ID NO: 264 - protein, 573 aa, Zygosaccharomyces kombuchaensis
MKVSIREVGRALKGKRVNYRGALYDKFPKIYNIYVIGFTACISGLMFGFDVSSMSSMIGTDGYKEFFGSPAATEQGGITACMPAGSFVACLVAPSFSDNFGRRVSLHLCATFWIIGAVLQCASQDLAMLCVGRVVSGIGIGFGSSVAPVYCSEVSPPKIRGAVSGLFQFSVTLGIMILFYIGYGAHFIDGAGSFRLTWGMEIVPGLCLLTAVFFLPESPRWLALHDRWEEAEEIVVRVSGKSDRARQEVKVQLKEIKDQVAIDKEAEEFTLKDLFRPKTRRKIIVGMMAQCWQQMCGMNVMMYYIVYIFSMAGYSGGAVLVSGSIQYVLNVVMTIPALFLFDRWGRRPVLLVGGVLMFTFLFGVGGILATYSVPYPEGFDGDTTVRIAIPSSNKAAANGVIACAYLFVCSYAPTWGVGIWTYCAEIFNNTERAKGSGLCAAVNWIFNFALALFVPSAFVNITWKTYIMFGVFSVALTINTFLMFPETKGKTLEEIDQMWDSHVPAWKSGSWVPVVPLVDEYDDEDQNKLKVEELEHVEDAASAEKLDRNSTEDKCSETQIEAMTRSNSNSHSV

SEQ ID NO: 265 - protein, 522 aa, Candida haemulonis
MGLEDNKFVQRFINVGEKKAGSTTMGIVVGVFAAFGGVLYGYDTGTINGIMAMDYVKKTFPSNGEEFTASETSLIVSILSVGTFFGSLAAPFFSDTLGRKWCLILSSLIVFNLGVILQTAATDIPLLCAGRAIAGAGVGLISSTIPLYQSEAAPKWIRGAIVSCYQWAITIGIFLAAVFNQASHARNDSGSYRIPIALQFLWALILGIGMFFLPETPRFYVSKEREDKAMEALSKLRKLPTDHPDLIEEYNDIKAAYEFEKEYGKSSWGQVLSSKNHQRKRLATGVLCQAFQQLTGVNFIFYFGTNFFNDAGVDGFVTTLATNIVNVGATVPGILLMEVAGRRNILLGGAAGMSISQLIVAIVGVAASSDSSKKVLVAFSCIFIAFFAATWGPCAWVVIGELFPLRTRAKSVALCTASNWLWNWGIAYATPYMVDKDKGNLGTNVFFIWGGCNFLCFFFAWYSIYETKGLSLEQIDELYEKVPHAWRSRGFIPSEHAFRETVHVDTRSDTKAEAISIEEVSV

SEQ ID NO: 266 - protein, 541 aa, Spathaspora sp.
MPSQIDVAFAKPALKVRTFLDKFPKIYNVYFIAMISTIAGMMFGFDISSMSAFIGTDSYVNFFDNPGSTIQGFITSCMALGSFFGSIASSFISEPFGRRLSLLVCSFFWMVGAAIQSSSQNRAQLIIGRIISGMGVGFGSSVAPIYGAELAPRKIRGLIGGLFQFSVTLGILIMFYLSYGLGHIDGVASFRIAWGLQIVPGLLMFFGCFIIPESPRWLAKQDLWDQAEDIVARIQAHGDREHADVLVEIGEIKEQLLIEESSKSIGYATLFKKKYIRRTLTAIFAQIWQQLTGMNVMMYYIVYIFQMAGYSGNANLVASSIQYVLNTATTVPALFLFDKVGRRPLLVVGAIFMMAFQFGVAGILATYSVPWPDSGSESVTIRIPEENKTASRGVIACCYLFVCSFASTWGVGIWVYCSEVWGDSRISQRGNALSTAANWIINFAIAMYTPSGFKNISWKTYIIYGVFCIVMAVHVFFGFPETRGKRLEEIGEMWDANIPAWRSASWEPHIPATSDAEIARKLSLEHKEGGLMEDSNSSDRV

SEQ ID NO: 267 - protein, 543 aa, Metschnikowia fructicola
MGYEEKLVAPALKFKNFLDKTPNIHNVYVIAAISCTSGMMFGFDISSMSVFVDQQPYLKMFDNPSSVIQGFITALMSLGSFFGSLTSTFISEPFGRRASLFICGILWVIGAAVQSSSQNRAQLICGRIIAGWGIGFGSSVAPVYGSEMAPRKIRGTIGGIFQFSVTVGIFIMFLIGYGCSFIQGKASFRIPWGVQMVPGLILLIGLFFIPESPRWLAKQGYWEDAEIIVANVQAKGNRNDANVQIEMSEIKDQLMLDEHLKEFTYADLFTKKYRQRTITAIFAQIWQQLTGMNVMMYYIVYIFQMAGYSGNTNLVPSLIQYIINMAVTVPALFCLDLLGRRTILLAGAAFMMAWQFGVAGILATYSEPAYISDTVRITIPDDHKSAAKGVIACCYLFVCSFAFSWGVGIWVYCSEVWGDSQSRQRGAALATSANWIFNFAIAMFTPSSFKNITWKTYIIYATFCACMFIHVFFFFPETKGKRLEEIGQLWDEGVPAWRSAKWQPTVPLASDAELAHKMDVAHAEHADLLATHSPSSDEKTGTV

SEQ ID NO: 268 - protein, 496 aa, Talaromyces adpressus
LFGFDVSSMSAWIATPQYLDYFGSPDSNLQGGITASMSAGSFGGAIAAGAISDYLGRRRALMLAACIWVIGAAIQCSAQNVAHLVVGRVVSGLAVGITSSQVCVYLAELAPARIRGRIVGIQQWAIEWGILIMYLIAYGCSVGVSGPAAFRIAWGIQGVPGLILLASLFFFPESPRWLGSKERWEECLDTLAALHAKGDRNDPVVQVEFEEVREAARIAHEAQDVSFLSLFGPRIWKRTMCGMTVQMWQQLLGGNVAMYYVVYIFEMAGMSGNTTLYSSAIQYVIFLVTTGIMLPRVDRIGRRPLLLFGSIACMACHFAIAGLMANYGHYVSEVNGNSNLRWSIEGAPAKGVIACSYIFVGFYGLTWAPGAWIYVSEIFPLKYRAKGVGISAATNWIFNFALAYFVAPAFTNIQWKTYIIFGIFCFVMAFQIFFTYPETARRSLEEIDLVFDTDVKPWRTSQIKDLFEEEIQHHREHKVDGEHKEFADAASHHEAV

SEQ ID NO: 269 - protein, 553 aa, Candida auris
MSKEDNSSGVQTPTNDSLMEKPIEEVKKQDSEEELPELPKKSAMEYLMVGLLCFLVAFGGFVFGFDTGTISGFVNMEDFKQRFGQLNGSGEYYLSDVRVGLMVSIFNVGCAIGGIILCKMGDQWGRRIGIMVAMVVYIIGIIVQISASDKWYQYFVGRFITGLAVGTVSVICPLFISEVSPKQIRGTLVCCFQLCITLGIFLGYCTTYGTKESYTDSRTWRIPLGLCFAWAILLLVGMVCMPESPRYLIEKHKIEDAKHSIARSNKVAVEDPAVYTEVQLIQAGIEREALAGNASWKELITGKPKILRRVIMGIMLQSLQQLTGDNYFFYYGTTIFKAVGLKDSFQTSIILGVVNFASTFLNIYLIERLGRRICLLAGSAAMFVCFVVYSVLGTTNLYIDGFDNTEENTRKPTGNAMIFITCLYICAFASTWAGGCYCIISETYPLRIRAKAMSVATAANWMWGFLISFFTPFITSAIHFYYGFVFTGCLLFSFFYVYFFVYETKGLSLEEVDEMYASGVSAWKSADWVPPSTAHMAHSTGFAADQKPGDEQV

SEQ ID NO: 270 - protein, 491 aa, Penicillium tularense
LFGFDVSSMSAWIGADTYKEFFDSPNSNLQGGITASMSAGSFAGSIAAGWLSDALGRRYALMIASLVWIIGSMVQCSAMNVTHLVAGRVVSGLAVGVTSSQVCVYLSELAPARIRGRVVGIQQWAIEWGILIMYLIAYGCVVGVSGPAAFRICWGVQAVPGLVLFVALFFFPESPRWLASKERWEKAMDTLATIHANGDRHDPVVQVEFEEVQEAVRVAHESQDVTFLALFGPGVWRRTMCGMSVQMWQQLLGGNVAMYYVVYIFEMAGMSGNTTLWSSAIQYVIFLVTTGVMLPFIDRVGRRNLLLIGSATCMVVHFIIAGVMASKGHPVSSVNGDANLTWEIKGSSGMAVIAFSYIFTGIYGLTWAPTAWIYASEVFPLKYRAKGVGISAATNWIFNFALAYFVAPAFHNIQWKTYIIFGVFCCVMTIHVFFTYPETVGRSLEEIDLVFEANFKPWQTHKIGHMFGEEIERRKEGDTKDVGGTSHKEVV

SEQ ID NO: 271 - protein, 539 aa, Meyerozyma caribbica
MGYEDKLVAPALKFRNFIDKTPNTYNVYLIASIACISGAMFGFDISSMSVFVGQKPYLDYFNSPKSDMQGFITAAMSLGSFFGSLLSSFVSEPFGRRASLLICGFLWCVGAAIQSSAQNVAQLIIGRIISGFGVGFGSSVAPVYGSEMAPRKIRGTIGGIFQFSVTLGIFIMFLIGYGCSKIHAVGSFRIPWGVQIVPGLFLLFGCFFIPESPRWLAKQGYWEEAEIIVANIQAKGNREDPDVLIEISEIKEQLLLDEHAKAFTYADLFTKKYLPRTITAIFAQIWQQLTGMNVMMYYIVYIFQMAGYEGDTNLIPSLIQYIINTVITIPSLYLLDKVGRRKMLLFGAAAMMAWQFGVAGILATYAEPYDYSDTVKILIPKKHKPAAKGVIACCYLFVASFASTWGVGIWVYCSEVWGDSQSRQRGAAVATAANWIFNFAIAMFTPSSFKNITWKTYCIYATFCGCMFIHVYFFFPETKGRRLEEIAQIWEEKVPAWKTSKWQPHVPLLSDHELAEKMSTKHDEGMLQSQASSEEKPTV

SEQ ID NO: 272 - protein, 360 aa, Paludifilum halophilum
MHNTKHNQVKEAIQSWILEGKVAPRQKIKSENEMVEIFGVSRHTVRQAIGDLVHEGWLYREQGRGTFCSDRTLSDQKPNKLIGIITTYISDYIFPSIIRGAESYLNSKGYSILLASTNNNVKEEKACLQTILNKNIDGLIIEPTKSALYNENLNYYLGLEANNTPYVMINAYYPQLQSPSLTVNDEQGGHMAAEHLIHLGHRRIIGFFKTDDLQGLHRMQGFLRAHREHRVTIDPELIVPFNTEEKEEKPKEALRRILRMKSEKPTAVFCYNDEIALNILDVVREQQLKVPEDLSIVGYDDSHFAQASEVKLTSVKHPKMVMGETAAQVLIEAIQEKGREIEPVVFQPELIVRSSTRKIE

SEQ ID NO: 273 - protein, 543 aa, Scheffersomyces stambukii
MSSKVEAAFSKPALKIRNLLDSIPNIYNVYFIAMISTIAGMMFGFDISSMSAFIGTEQYQNYFHAPSTDMQGFITSAMALGSLFGSMASSFVSEPFGRRLSLLTCSFFWMIGAAIQSSSQNRAQLIIGRIISGIGVGFGSSVAPVYGSELAPRKIRGFIGGIFQFSVTLGILIMFYLSYGLHFIDGVGSFRIAWGLQIVPGLVLFMGCFIIPESPRWLAKQNQWEDAEFIVAKIQAKGNREDPDVMIEISEIKEQLLIDEESKNVSYATLFKKKYIRRTLTAMMAQVWQQLTGMNVMMYYIVYIFNMAGYSGNANLVASSIQYVLNTGMTVPALYFLDKLGRRPLLIGGAIFMMTFQAGVAGILGEYSVPWPDSGSDTVSIRIPDDNKRAAKGVIACCYLFVCSFASTWGVGIWVYCSEIWGDNRISQRGNALSTTANWALNFAIAMYTPSGFKNITWKTYVIYAVFCFCMGVHVYFGFPETRGKRLEEIGQMWDEGVPAWRSGSWQPHIPLLSDSELANKMSVQHKEEGLISPDTGSSEDKA

SEQ ID NO: 274 - protein, 556 aa, Torulaspora microellipsoides
MGQVRDVLLMKKVNYRGTFYDKFPKIYNIVVIGCVSCISGMMFGFDISSMSSMIGTDGYKHFFGTPDATKQGGITACMSAGSFVGSLISPYFSDTYGRRVSLHLCSAFWITGAILQCASQDIAMLCVGRVVSGIGIGFGSSAAPVYCAEVSPPKIRGAICGLFQLSVTIGIMILFYIGYGCSYISGAGAFRVTWGLQIVPGLCLLFCTFFLPESPRWLALHDRWDDAYEIVAKVAAKGNREDEQVKIQMEEIKEQVFIDKEAEAFGYKDLFRPKTRLKTIVGMLAQMWQELCGMNVMMYYIVYIFEMAGHTGSTVLVSGSIQYVLNVVLTIPALFLVDKAGRRPVLIVGGILMFSWLFAVAGLLATYSVPQPDGFDGDTTVRISIPKSQKGGASGVIACSYLFVCSFAPTWGIGIWIYCSEIFNNTERAKGSAVCASVNWIFNFALALFVPTAFKNITWKTYIMFGVFSVALTINTWLMFPETKGKTLEEIDQMWASKVPAWKTSSWVPDVPVLPYSDDIAKKDFGVSHLEEADTKGMVSEKHSSRDGSKSNSLSD

SEQ ID NO: 275 - protein, 498 aa, Morchella semilibera
LFGFDISSMSAWIGAHQYLEYFDHPDSDLQGGITASMSAGSFIGALCAGYLSDIMGRRYALVVASFIWIIGSIVSLSAQNVGHLIAGRIINGLSVGIMSSQVPVYLAELSPKNIRGRVVGIQQWAIEWGILIMYLISYGCTFIKGPAAFRTAWGIQGIPAIILLVALLFFPESPRWYASKDRWEEALDTLALLHGNGDINNPLVQAEYEEVREAQQLAAQGAAMSWLGLFGPNMWRRTTAALAAQIWQQLLGGNVMMYYIVYVFQMAGLVGNVNLVSSAIQYVIFLVTTAITLCFIDKLGRRPLFIYGGVAMGALNFAVAGLMKTGGHAVDSVGDNFNIKWQVQGSYATGVIACSYLFVAFYGLTWAPGAWVFISEIFPLQYRAKGVGLATAANWLFNFALAYFVPPAFRNIQWRTYIMFGVFCFCGVVHSFFMFPETAGKTLEEIDYLFGKDVPAWKSAKIHSRLDERVGDLEHKAGHNDTAIESEKVAATTVESTR

SEQ ID NO: 276 - protein, 541 aa, Spathaspora boniae
MSSKIDRAFEGPALKFRNFLDKTPNLYNVFVIASISTIAGMMFGFDISSMSAFIGTPSYMKFFNSPGSDMQGFITSCMALGSFFGSIASSFISEPFGRRLSLLICSFFWMVGAAVQSSSQNRAQLIIGRLISGVGVGFGSSVAPIYGSELAPRKIRGLIGGLFQFSVTLGILIMFYISYGLGKINGVASFRIAWGIQIVPGLILFLGCFFIPESPRWLAKKGYWDDAEYIVARIQAKGNREDPDVLIEISEIKEQILIEESSKSIGYATLFKKKYIFRTFTAVFAQIWQQLTGMNVMMYYIVYIFQMAGFSGNANLVASSIQYVLNTACTVPALWLVDKIGRRKLLIGGAVMMMIFQFGLAGILATYSVPWPDSGNDAVNIRIPDDKKAASHGAIACSYLFVCSFAMSWGVGIWIYCSEIWGDNGISQRGNATSTAANWILNFAIAMYTPSGFKTISWKTYIIYGVFCIVMGIHVFFGFPETKGKRLEEIGQMWEEKVPAWRSASWQPSVPIATDAELAKKMSVEHKEDGEGVLDTGSEEA

SEQ ID NO: 277 - protein, 493 aa, Ilyonectria destructans
FDISSMSAWIGSDQYLEYFNHPGSTEQGGITASMSAGSFVGALVAGVLADRLGRRKALMVACVFWVIGAVVQCSAQNVGHLIGGRIISGLAVGITSSQVLVYLAELAPSDIRGRVVGIQQWSIEWGILIMYLISYGCSINIDGPSAFRIAWGIQAIPGFILFIGLFFFPESPRWLASHDRWEEAHFNLAHLHAGGDLDSPVVIAEMEEVREAVRISQESKDIGYLGLFGPKIWKRTVVGVSVQIWQQLLGGNVMLYYLVYIFNMAGMSGNVALTSSIIQYVIFLVTTGGVLPFIDRLGRRWLLIGGAITCGVLHFASGAIMASYGHAVDSVDGNDILRWSLSGAPAKAVIALAYIFVGVYGLTWAPVAWIYAAEVFPLKYRAKGVGLAAAGNWIFNLALAFFVPPAFTNIKWKPYMIFGTFCIAMTFHAFFTYPETSRKTLEEVDRLFDSNIPAWRSASAGGTFKEKVEEARRTGGLKGVEDDEETAAQVETA

SEQ ID NO: 278 - protein, 525 aa, Sugiyamaella xylanicola
MGLENNKIVQRFVNVGEKKAGSTTMGIFVGMFAAFGGVLYGYDTGTISGILAMKYVVKQFAKNGTDFTSSERSLIVSILSVGTFFGAILAPLASDTIGRRWSIIIASLIVFNVGVILQAAATGIPLLCAGRAIAGFGVGLISSNIPLYQSEATPKWIRGAVVSCYQWAITIGLLLASLVNQGSHARDDSGSYRIPICIQFLWSLILGVGMIFLPETPRFYVSKGNNEAALRSLSRLRKLDIDHPDLLEEHADIKAAYDFETQFGKSSWSQLFTTRNQQFKRLMTGIWIQAFQQLTGVNFIFYFGTTFFESAGLNGFISNLATNIVNVGSTIPGILLTDVVGRRKILIGGAIGMCLSQYIVAIVGVATPADSRASSNVLIAFSCIFIAFFAATWGPSAWVVVGEIFPLRTRAKSVALSAASNWLWNWAIAYATPYMVDPGPGNGDLGVKVFFVWASCNFLCILFSYSLVYETKGLSLEQVDELYEIVPQAWKSPGFVPSRHAFREGDPSISYGPEKATIVVSEESV

SEQ ID NO: 279 - protein, 491 aa, Saccharomycopsis fibuligera
FDISSMSAIIGTPQYTKYFNEPGSTLQGGITASMSAGSLIGSLLSGVVCDHLGRRKTIQFSCIFWIIGCVLTCAAQNVPMLIVGRVCNGLTVGFTSSQVPVYLSEVSRRTVRGKIVGIQQWAIEWGILIMYFIGYGCSYIKGTASFRVPWILQVIPALVLVTFIMCLPESPRWLASKGRWEEALDVLANVHAKGDQNDPEVLAEMLEIREIVEIESTETNSYWELYTRKNIYRTFTAMFCQCFQQLTGGNVVMYYVVYVFQMAGLTGSVNLISSSVQYIIFLVFTIPTLFMMDKVGRRTLMVWGAVAMAICMYIIGAVLAQKGEYVDQVGDNKNIHISLKNSPAASRAVMVFSYIFTLFYSLTWAPTAWVYCPEVFPLYLRSKGMAVSAATNWSMNFALAFYVPPAFNNIGWKTFIIFGVFNSYAAIHIFFTFPETAKKTLEEIDELFAKDGPHAWKTKVGSTKFEQVVDEVKDDPKATAEHLEEQSVDKA

SEQ ID NO: 280 - protein, 587 aa, Yarrowia alimentaria
MHKLLAFTQASKEVKTSFLGCRGQKLHNVVAAIAGIGFLLFGYDQGVMGGLLTLGTFIHQFPLMDTSDYLPPAVKTYNTTIQGTAVGIYEIGCMIGALFTMWAGDKLGRRYMIFWGSIIISIGAILQCASYSLGQFIVGRVVAGIGNGFITATVPMLQSECAKPERRGKLVMLEGALITAGIALSYWIDFGFYWVHTNDSDWRFPIAFQCIFSVFLTLTIMSLPESPRWLVKKQRFDEAAGVFAALEDVPLDDPYVLEQITSVKESIMLEQLAQLGVDGAEARDKISSGEFQMGEELHFVGQMKLMFTFGKKKNFHRTMLAYWNQVMQQVTGINLITYYAAYIYQTSVGMNGTDSRILAACNGTEYFMASWVAFYTIERFGRRKLMLFGAIGQACTMAILTGCVYAASKPEDGGLDMQGAGIAAAVFLFVFNTFFAIGWLGMTWLYPAEICSLEIRAPANGLSTSGNWAFNFMVVMITPVAFNTIKWKTYIIFACINAFMVPVVYFFYPETAGRTLEEIDFIFAQSNPRTPWDVVGIARRLPKGAHADDMVAPPVVAYEEKPTVETEESTSPEELSDVSQSEFTFSH

SEQ ID NO: 281 - protein, 585 aa, Yarrowia alimentaria
MKNIFAFAKASTHVKTEFLGCRGTPLHRVVAAIAGMGFLLFGYDQGVMGGLLTLPTFVQQFPSMDTSSSLPPDVKTHNTTIQGTAVGIYEIGCMLGALFTMWAGDKLGRRYMIFWGSIIITIGAILQCAAYSLGQFIVGRIVAGIGNGFVTATVPMLQAECARPERRGALVMLEGALVTGGIALSYWIDFGFYFVKTNDADWRFPVAFQCVFSMFLTFTVMYLPESPRWLVKKGRYEEAAGVFAALEDVSLDDPYVTDQVSRVKESIMMGQLAQHGVEGEEAQRKIATGEYTMGKELPFMDQIKMLFTYGKKKHFHRTMLAYWIQVMHQISGINLITYYAAYIYQTSIGMNAMNARILAACNGTEYFLASWVAFYTIERFGRRKLMLFGTIGQACTMAILCGCVYASSPLKDGGQANESAGIAAAVFLFVFNSFFAIGWLGMSWLYPAEITSLEVRAPANGLATSGNWVFNFMVVMVTPVAFNSIKWRTYIIFACINTAMIPAIYFFYPETMGKTLEDIDAIFAQSNPRTPWDVVGIAQRLPSSAGDIIEPTAIILEKPDIENLEYAGSMNGGTIASGRSGSDIY

SEQ ID NO: 282 - protein, 584 aa, Yarrowia galli
MNWLVPSTSGQVKTSFMGFRGQRLHHYVATVAGMGFLLFGYDQGVMGGLLTLPSFVKQFPKMDTSDYLPPDVKSFNTTIQGTAIAIYEIGCMMGALFTMWAGDKVGRRYIIFYGSIIMTIGAVLQCASYSLGMFITGRVVSGVGNGFITATVPMLQSECAKPEKRGKLVMLEGALITAGIALSYWIDFGFYWVKTNDADWRFPVAFQIVFCLFLFFTVLTIPESPRWLVKKGRFDEAAGVFAALEDVDIDDAYVISQITYVKESIMLEQLAQLGVDGSAAREKIASGEFSMGKELPFLSQMKLMFTFGKKKNFHRTMLAYWSQVMQQITGINLITYYAAYIYETSVGMTPTNSRILAACNGTEYFLASWIAFYTIERFGRRKLMIFGAAGQAATMAILTGCVYAASSPADGGLDNQNAGVAAAVFLFVFNTFFAIGWLGMSWLYPAEISSLEIRAPANGLSTSGNWVFNFMVVMITPVAFDTIKWKTYIIFAVINAAMVPVVYFFYPETAGRSLEEIDQIFADSNPKTPWDVVWIARRLPKSSAVDETLLEPRRTAQEEEKTALENVESVSPGSSDREEASGRV

SEQ ID NO: 283 - protein, 576 aa, Yarrowia galli
MKLQVPAFARSSSEVKTSFMGARGQKLHNLVAAIAGMGFLLFGYDQGVMGGLLTLDTFIQQFPKMDTSDYLPPKVKTFNTTIQGTAVGIYEIGCMIGALFTMWAGDKLGRRYMIFFGSIIMTIGAILQCASYSLGQFIVGRVVSGIGNGFITATVPMLQSECAKPERRGKLVMLEGALITAGIALSYWIDFGFYWVHTNDSDWRFPIAFQIVFSLFLTCTIMSLPESPRWLVKKQRFEEAAGVFAALEDVPLDDPYVTNQINAVKESIMMEQLAQLGVDGADARRKIQSGDFHMGQELPFIGQMKLMFTFGKKKNFHRTMLAYWNQVMQQITGINLITYYAAYIYQTSVGMNATDSRILAACNGTEYFMASWVAFYTIERFGRRKLMLFGAVGQACTMAILTGCVYAASKPEDGGLDNQGAGIAAAVFLFVFNTFFAIGWLGMTWLYPAEISSLEIRAPANGLSTSGNWAFNFMVVMITPVAFNSIKWKTYIIFACINAFMVPVVYFFYPETAGRSLEEIDMIFAESNPRTPWDVVGIANRLPKNAVVNYDDYEAGQEEKAIAETEESVPDSAEFQ

SEQ ID NO: 284 - protein, 589 aa, Yarrowia phangngaensis
MLSWFTSSPGEVKTEFVGRRGQSLHRAVAFVGGMGFLLFGYDQGVMGGLLTLPRFVKQFPMMDTSANLDESTRKFNTTIQGTAVGIYEIGCMMGALFTMWAGNVLGRRRIIFWGSIIMTIGAILQCAAFSLAMFIVGRIVSGVGNGFITATVPMFQSECARPERRGALVMMEGALITGGIALSYWIDFGFYWVNNDADWRFPIAFQIIFSMFLTFSVMHLPESPRWLVMKQRFDEAAGVFSALEDVPIDDPYVVDQLAEVKESIMLEQLAQLGVNDSEAREKIKSGEFQMGEELPFWEQMKLLFTFGKKKNFHRTMLAYFNQVMQQITGINLITYYAAFIYETSVGMSPMNSRILAACNGTEYFLASWIAFYTIERFGRRKLMIFGALGQSITMAILTGTVYAASPIADGGLNNSGAGIAAAAFLFVFNTFFAIGWLGMTWLYPAEITSLEIRAPANGLSTSGNWIFNFMVVMITPIAFDTIKWKTYIIFACINAAMVPVVYFFYPETAGRSLEEIDKIFAESNPRTPWDVVGIARRLPRSSALSRRRAGVAQGQEDNYDQEKAIADVSEFATGSSSVSAAHSFENSRP

SEQ ID NO: 285 - protein, 562 aa, Lachancea meyersii
MSSVTTPANNMSGSSTNVGAPSNAAVFDSQSMTPSNKMSDDAFELKARPEEHREIPQKPLSEYILVMSLCLMVAFGGFVFGWDTGTISGFVNMTDFKRRFGEFDTETGTYYLSDVRTGLIVAIFNIGCAVGGLTLGRLGDIKGRRLGLMSVIAVYVVGIVIQIASTDKWYQYFIGRIISGLGVGGIAVLSPTLISETAPKHLRGTCVSFYQLMITLGIFMGYCTNYGTKTYSNSVQWRVPLGLCFMWAIFMVAGMVFVPESPRFLIEKGRLEEAKRSLAKSNKLTTEDAGIIAEVDLINASVEAEKLAGNASWGELFSPKGKILQRVIMGAVIQSLQQLTGNNYFFYYGTTIFQAVGLEDSFQTSIILGVVNFMSTFVGLYTVEKYGRRKCLLWGSAAMSVCFVVFASVGVTRLWPDGRDAPSSKSAGNAMIFFTCLFIFFFATTWAPIAYVIVAETYPLRVKNRAMAIAVGSNWIWGFIIGFCTPFITSAINFYYGYVFMGCLVFSFFYVFFFVCETKGLTLEEVNEMYQEGVLPWKSEQWVPALRRDEFYGAEESSNSNA

SEQ ID NO: 286 - protein, 574 aa, Lachancea fermentati
MSTGAADTQAVNFDEGTPVDLHSAASNDSQLSTPSNKASKDELKDVRFPEKVVDEMNEIPKKPASAYVTVCILCLCVAFGGFVFGWDTGTISGFVNQTDFKRRFGDWSNTDQDYYLSNVRTGLIVAIFNIGCAFGGITLSKVGDVYGRKMGLTVVVLVYIIGIIIQIASINKWYQYFIGRIISGLGVGGISVLSPMLISETAPKHLRGTLVACYQLMITAGIFLGYCTNYGTKNYSNSVQWRVPLGLCFAWAIFMIVGMSFVPESPRYLVENGKIEEARRSVARSNKVSIEDPAVQAEIDLIAAGVEAEKLAGSASWGELFSTKTKVLQRLIMGIMLQSLQQLTGDNYFFYYGTTIFKSVGLSDSFQTSIVIGIVNFASTFVGIYTVERFGRRKCLLWGAASMTACMVVYASVGVTRLWPVAGNHDISSKGAGNCMIVFTCFYIFCFATTWAPTAYVITSESFPLRVKSKCMAIATGCNWIWGFLIGFFTPFITSAINFYYGYVFMGCLVFMYFYVLFFVPETKGLTLEEVQEMWEEGVLPWKSDSWVPPSRRGADYDAEALQHDDKPWYKRMI

SEQ ID NO: 287 - protein, 574 aa, Lachancea fermentati
MSTEAAGLQTAQFNEGTPVDLHSTVSNNSQLSTPSNKASRDELKDVRFPEKVVDEMNDIPKKPASAYVTVCILCLCVAFGGFVFGWDTGTISGFVNQTDFKRRFGEWSNTDQDYYLSNVRTGLIVSIFNIGCAFGGITLSKIGDVYGRKMGLTVVVLVYVVGIIIQIASINKWYQYFIGRIISGLGVGGIAVLSPMLISETAPKHLRGTLVACYQLMITAGIFLGYCTNYGTKNYSNSVQWRVPLGLCFAWAIFMIVGMSFVPESPRYLVENGKIEEARRSVARSNKVSIEDPAVQAEIDLIAAGVEAEKLAGSASWGELFSTKTKVLQRLIMGIMLQSLQQLTGDNYFFYYGTTIFKSVGLSDSFQTSIVIGIVNFASTFVGIYTVERFGRRRCLLWGAASMTACMVIYASVGVTRLWPDSSNHDISSKGAGNCMIVFTCFYIFCFATTWAPIAYVIVSESFPLRVKSKCMAIATGSNWVWGFLIGFFTPFITSAINFYYGYVFMGCLVFMFFYVFFFVPETKGLTLEEVQEMWEEGVLPWKSDSWVPPSRRGADYNAEALQHDDKPWYKRML

SEQ ID NO: 288 - protein, 561 aa, Candida arabinofermentans
MFLLTPLRKFRDWEIPERLLIENYVADKNLIKSIIALSCLAIFFFGYDQGMMSGVNNSPEYVGRMKIGYWDESGAVTVTDSTKQGGIVAIYYLGTLVGAIFGGYVSDEVGRIKSIGLGTIIAIVGAIVQGCSRDTPMMCGTRFFTGIGTGILNAVVPVYSSECASHLSRGAAIALEFTLNIFGVCLAYWLAYGLSYIGILSQFRWRFPIFFQIIPLAFLVAIVWFFPESPRYLIKSGKYDRAKKLLIQLRGEDGGQREFEEIIAAFDYEKDSALSTNYVRMFFDWYSGSKEAIKKAKKLHIARRIQLVIWLQIMQEWTGIAGITVYQTDIFTQAGYSSGKSQWLAAVNNTIYTLSTVLAIYTIDRFGRRFANFWGLGSMGVCMFLAGGLSKAQQLHPDNKNFGAAATAFVFLFTAIFGATLLMTPWILPSEVFPLKLRAAGNAMGVVGWSIGNGWLMLMSPIMFNAIHEKTLYIFGACNFLTIVMVYFLYPETANRSLEDIDFLFASESWLVSKCEAEFAKIIAERHELLNQAHEMTNDMKAEAKYVEQTSDAESTDNAET

SEQ ID NO: 289 - protein, 556 aa, Kluyveromyces marxianus
MTLKDKLLLRNIEFKGTFYAKFPQIHNIYAIGVISCISGLMFGFDISSMSSMIGTETYKKYFDHPKSITQGGITASMSGGSFLGSLLSPAISDTFGRKVSLHICAVLWIVGCILQSAAQDQPMLIAGRVIAGLGIGFGSGSAPIYCSEISPPKVRGLITGLFQFSITVGIMILFYVGYGCHFLSGNLSFRLTWGLQVIPGFVLLVGVLFLPESPRWLANHDRWEETESIVAKVVAKGNVDDEEVKFQLEEIKEQVILDAAAKNFSFKDLLRPKTRKKLFVGVCAQMWQQLCGMNVMMYYIVYVFNMAGYTGNTNLVASSIQYVLNVLMTFPALFLIDKVGRRPVLIVGGIFMFTWLFAVAGLLASYSVPAPNGVNGDDTVTIKIPHKHKPAARAVIACCYLFVCSYAPTWGIGIWIYCSEIFNNMERAKGSSVSTATNWAFNFALAMFVPSAFKNISWKTYIVFGVFSVALTVQTYFMFPETRGKTLEEIDQMWVDNIPAWKTSSYIPQLPIIEDEFGNKLGLLGNPQHLEHVKSVEKDTVVEKLESSEANSSSSV

SEQ ID NO: 290 - protein, 554 aa, Debaryomyces hansenii
MSQEEYSSGVQTPVSNHSGLEKEEQDKLDGLDENEIVDQLPTLPEKSAKDYLLISFFCVLVAFGGFVFGFDTGTISGFVNMSDYLQRFGEVDSDGEYYLSNVRTGLIVAIFNVGCAVGGIFLSKVADIYGRRIGIMFSMIIYVVGIIVQISASDKWYQIVVGRAIAGLAVGTVSVLSPLFIGESAPKTLRGTLVCCFQLCITLGIFLGYCTTYGTKTYTDSRQWRIPLGLCFAWAIMLVIGMVCMPESPRYLVVKNKIEEAKKSIGRSNKVSPEDPAVYTEVQLIQAGIEREKLAGSASWTELVTGKPRILRRVIMGIMLQSLQQLTGDNYFFYYGTTIFQAVGMTDSFQTSIVLGVVNFASTFVGIYTIEKYGRRLCLLTGSICMFICFIIYSILGVTNLYIDGYDGATSVPTGDAMIFITTLYIFFFASTWAGGVYCIISETYPLRIRSKAMSVATAANWIWGFLISFFTPFITSAIHFYYGFVFTGCLLFSFFYVYFFVAETKGLTLEEVDELYAQGIAPWKSSSWVPPTKEEMAHSTGYAAESKPHDQQV

SEQ ID NO: 291 - protein, 546 aa, Debaryomyces hanseniiDebaryomyces hansenii
MKISIPEKYLLENKVKGKKLTHCVVALAALAIFFFGYDQGMMAGVNTSPDYVGKMKYGYFDENGDVTVTNSTRQGGIVAIYYFGTLVGCVFGGLFSDRQGRIKAIALGALIAMFGAALQCAAQQMSWMCGARFVNGVGTGILNAVVPVYSSETAEHTSRGAFIAIEFTLNIFGVCVAYWLEYGLSYIDGGFSAFQWRFPIAFQIIPLIVLFGIVWFFPESPRWLIKNGEEDHAKRILLNMRGVERGNQEFHEIVDAMRFEQDSALSSSYWRMFLGYFPNEDIKKSAKAKTLHIARRVQIVIWMQILQEWVGIAGVTVYQPEIFKQAGFGTRKSAWLSGLNNIFYCLSTLINFFTVDRFGRRFTLFWGAIGQGISMFLAGGFSKLQQNNPKNSSYGAAAASFVFIYTSIFGATWLAVPWLYPTEIFPLKVRAQGNAFGVVGWSIGNGWLTLLCPIMFSKIGEKTLYIFGACNFLSLALVYLFCPETANRTLEDIDYLFANDSWLASKSETDFKRIKIEQVDKQCEPEKYTIDIDSSEKEKLQTEHSE

SEQ ID NO: 292 - protein, 527 aa, Debaryomyces hansenii
MGLEDSAIIRKYVNVGERKAGSASMGIFVGAFAAFGGVLYGYDTGTISGIMAMNYVKGEFPANKESFTSKESSLIVSILSAGTFFGAILAPLVSDTLGRRWSIIISTFIIFNLGVILQTASTAIPLLCAGRAIAGFGVGLISAVIPLYQSEATPKWIRGAVVSCYQWAITIGLLLAACVNQGTHNRNDSGSYRIPIAVQLLWSLILGTGMIFLPDTPRFWIHKGNEDEAKKSLKILRKLPLDHPDLLEEYDDIKAAYDFECSFGKSTWGDLFTTKNKQLKRLFTGVALQAFQQLTGVNFIFYFGTSFFQSAGIENEFLISLATNIVNVGMTVPGILLIELVGRRSMLLWGAVGMSVSQFIVAIVGVATDSSAADKVLIAFTCFFIAFFASTWGPIAWVVVGEIYPLRTRAKSVALSAASNWLWNWAIAYATPYMVDSGKGNANLGTNVFFIWGGCNFLCVMFTYLFIYETKGLSLEQIDELYEKVPHAWKSRGFIPSTHAFREDAPESISSIGKDMEKVTEVETTSV

SEQ ID NO: 293 - protein, 544 aa, Scheffersomyces stipitis
MGYEDKLVQPALKFRKFLDKFPNLTNVYIIALISCISGMMFGFDISSMSAFIGEADYNRFFNTPNSTIQGFITSCMALGSFFGSIASSFVSEPFGRRASLLLCAFFWMVGAAVQSSSQNRAQLMIGRIISGFGVGFGSSVAPVYGSELAPRKIRGLIGGIFQFSVTLGILIMFYICYGLHFINGVGSFRIAWGLQIVPGLVLFIGCFFIPESPRWLAKHGYWDEAEEIVCLIQAKGDRENADVLIEISEIKEQVLLEENLKSFTYYDLFTRKYIRRTLTAVFAQIWQQLTGMNVMMYYIVYIFNMAGYENNANLVASSIQYVLNTAATVPALYLMDKIGRRRLLIGGAVFMMIFQFGVAGILGNYSVPVPGGLPGNPTVRIKIPDSNKGAARGVIACCYLFVVSFACSWGVGIWVYCSEVWGDSASRQRGAAVSTAANWILNFAIAMYTPSSFKNITWKTYIIYACFCAVMGLHVYFGFPETKGKRLEEVAQMWEENVPAWKSTKWQPHVPLLSDAELANKMNVEHKEEQLHSPESGSSAEEKV

SEQ ID NO: 294 - protein, 527 aa, Schwanniomyces occidentalis
MGLENNKIVQRFVNVGEKKAGSTSMGIFVGAFAAFGGLLYGYDTGTISGILAMKYVIKQFAKNGTEFTSSEKSLIVSILSVGTFFGAILAPLMSDTIGRRWSIIIASLIVFNVGVILQAASTGIPLLCAGRAIAGFGVGLISSNIPLYQSEATPKWIRGAVVSCYQWAITIGLLLASLVNQGSHSRNDSGSYRIPICIQFLWALILGVGMLFLPETPRFYVSKGDHESAKRSLSRLRKLDIDHPDLVEEHADIKAAYDFETQFGKSSWSQLFTTRNQQFKRLMTGVWIQAFQQLTGVNFIFYFGTTFFESAGLNGFISNLATNIVNVGSTIPGILLTDVVGRRKILISGAIGMCVSQYIVAIVGVATPAESKASSNVLIAFSCIFIAFFAATWGPSAWVVVGEIFPLRTRAKSVALSAASNWLWNWAIAYATPYMVDSGPGNGNLGVKVFFVWASCNFLCILFSWSLVYETKGLSLEQVDELYELVPQAWKSPGFVPSTHAFRDDAPSIGFGSGKVTAVSEVEEVSV

SEQ ID NO: 295 - protein, 558 aa, Wickerhamomyces anomalus
MKAYEERLVGPADKFRRFLDKTPNLTNIVVICMISCVSGLMFGFDISSISAFISEDYYKNYFHEPDSTLQGFITAAMSLGSFFGSLASSFISEPLGRRASLLTCAFFWCVGAAIQSSSQNVVQLILGRIIGGIGVGFGSSVAPIYGSELAPRRIRGFIGGLFQFSVTLGILIMFYISFGLHYIKGVGSFRIAWGLQIIPGLVLFIGCFFIPESPRWLAKNGYWDEAEEIVASIQAKGNREDPDVQIEISEIKEQLLIDEHVKNFTYADLFKKKYINRTFTAIFAQIWQQLTGMNVMMYYITYIFEMAGYSGNTNLVASSIQYVLNTVTTIPALYFLDKLGRRPVLLFGAAAMMAWQFAVAGLLATYSVPISDYNGSDTVRIRIPESNKSAAKGVIACCYLFVCSFATSWGVGIWLYVSEIWGDPICRQRGASLATAANWIFNFAIAMFTPSSFKNITWKTYCIYATFCACMFIHVYFGFPETKGKRLEEIAQIWDEGVPAWKSKNWQPRVPLLSDKQLNEKLTVQHNEGGLTQSNESPALSDKEQVEHVPSTSQQESV

SEQ ID NO: 296 - protein, 559 aa, Lachancea cidri
MSLKNKLLCRDVQFRGALYDRFPKIYNIYVIGMVSCISGLMFGFDISSMSSMIATDHYKNYFHNPDSLTQGGITASMAGGSFLGSLVSSSVTDAYGRRVSLHVCATAWIIGAIIQCAAQDQAMLIVGRVISGIGIGFGSSAAPVYCSEVAPAKIRGLICGLFQFSVTLGIMVLFFVGYGCHFIDGTAAFRLTWGLQMVPGLVLMVATFFLPESPRWLANHDRWEETLEVVSNVGAHGNREDPEVKFLMDEIREQVLIDRDALNFGYKDLFRKKTLPKTIVGLCAQMWQQLCGMNVMMYYIVYIFEMAGSTGNTVLLSGSIQYVLNVVMTIPALFLVDKAGRRPVLLVGGVFMAIWLFVVAGLLAQYSVPQPNGFDGDDTVRISIPDTEKGAARGVIAASYLFVCSFAPSWGVGIWIYCSEIFNNMERAKGSALSAAVNWAFNFALAMFVPSAFRNITWKTYIVFAVFSVCLTIQTFFMFPETRGKTLEEIDQMWADNVPAWRTGSYVPQLPVMEDEDGTKLGLSGRAQHVESAGSNEKHHLTNDTGVDSTPENDSSRSA

SEQ ID NO: 297 - protein, 574 aa, Lachancea cidri
MSTGAASTQAAQFDEGTTPVDLHSTVSNNSQLSTPSNKASRDELKDIRFPENAIDEMNEIPKKPASAYLTVCLLCLCVAFGGFVFGWDTGTISGFVNQTDFLRRFGQYSHSDQTYYLSNVRMGLIVAIFNIGCAFGGIILSKIGDVYGRKMGLTVVVLVYVVGIIIQIASITKWYQYFIGRIISGLGVGGIAVLSPMLISETAPKHLRGTLVACYQLMITAGIFLGYCTNYGTKNYSNSVQWRVPLGLCFAWAIFMILGMSFVPESPRYLVEKGLIEEAKRSVARSNKVTVEDPAVQAEIDLIAAGVEAEKLAGTASWNELFSTKTKVFQRLVMGIMIQSFQQLTGDNYFFYYGTTIFKSVGLSDSFETSIVIGIVNFASTFVGIWTVERFGRRTCLLWGAATMVACMVVYASVGVTRLYPNGKNEASSKGAGNCMIVFTCFYLFCFATTWAPTAYVIVSESFPLRVKSKCMALATASNWVWGFLIGFFTPFITGAINFYYGYVFMGCLVAMYFYVFFFVPETKGLSLEEVQELWEEGVLPWKSASWVPPTRRGADYDVEELAHDEKPWYKRMM

SEQ ID NO: 298 - protein, 455 aa, Yarrowia deformans
CTIIMDGYDGNMVPSFYALPVFQKKYGVQLPSGDWTIEAKWQTAFLVGVPIGRITGALGVGLLADKYGRKKVTIASLACMVGLTFLVFFATGKEMLCAGWILSGVIWGVFNTMAPTYVSEVCPVKMRSLLAAAINLSWVTGQFISTGVVTGTSTRTDDWAYRVPLAVQWVFPAILIPLLCFAPESPWWYLRHGEVEKARNSLSRLADGSKIDLDAHIAHMIETDKEEDRSGTIAECFQGADLLRTEICSMAYAIQPLSGANIINFFAFFFQLTGVPQDIIFKLTLGLTGLGFVATLVSSIPIARVGRRVIMLTGLSVLTVALFAMGILGCFSSKGTNWATAILLFVWVGTYDMSIGPGAFVIYSESSSVRLRSKTIAIASVVTSLVTLVFNVATPYMLNEAEANMRGLVGFVYGPLCVLSLIWVYFRVPELKGLSYMEIDRLFQGEKVDKRVGGV

SEQ ID NO: 299 - protein, 455 aa, Yarrowia deformans
CTIIMDGYDGNMVPSFYALPAFQKKYGIQLPSGDWTIEAKWQTAFLVGVPVGRITGALGVGLLADRFGRKKTTIVSLSCMTAITFLVFFATGKEMLCAGWVLSGVIWGVFNTMAPTYVSEVCPVKMRSLLAAAINLSWVTGQFISTGVVTGTSTRTDEWAYRVPLAVQWAFPAILIPLLCFAPESPWWYLRHGEIDKARNSLSRLADGSKIDLDAHIEHMIQTDKEEDRSGTLAECFKGADLVRTEICSMAYAIQPLSGANIINFFAFFFQLTGIPQDIIFKLTLGLTGLGFLATLLSSIPIARVGRRAIMLTGLAVLTVTLFTMGILGCFSSKGTNWATAILLFVWIGTYDSSVGPACFVIYSESSSVRLRSKTIAIASVVSSLVTLVFNVAVPYMLNEAEADMRGLVGFVFGPLCVLSIIWVYFRLPELKGLSYMEIDRLFQGEKEVGERHSV

SEQ ID NO: 300 - protein, 505 aa, Yarrowia deformans
MSIKSLSKGSHETPVVITQVFTPTNLDKDLSLWETMKIYRKATLWCFVMCCTIIMDGFDGNIVPSFYALPAFQRKYGVQLPSGDWSIEAKWQTAFIVGVPIGRILGALGVGLLADKYGRKKITIASLACMVAVTFLVFFATGKEMLCAGWVLSGVIWGVFNTMAPTYVSEVCPVKMRSLLAAAINLSWVTGQFISTGVVTGTSTRTDDWAYRVPLAVQWAFPAILIPLVSFAPESPWWYLRHGEIDKARNSLSRLADGSKIDLDAHIAHMIQTDKEEDRSGTISECFQGTDLLRTEICSVAYAIQPLSGANIINFFAFFFQLTGVPQGIIFKLALGLTGLGFLATLLSSFPIARVGRRAIMLSGLSVLTVALFAMGILGCFSSKGTNWATAILLFVWTGTYDLSIGPGAFVIYSESSSVRLRSKTIAIASVVSSTVTLVFSVAVPYMLNEAEANMRGLVGFVYGPLCVLSLIWVYLRLPELKDLSYMEIDRLFQGQKVGKDVDSV

SEQ ID NO: 301 - protein, 518 aa, Ambrosiozyma monospora
MRLPKVYNPYVSAIIATIGGSLFGFDVSSISAIIGTDQYLKYFGSPDSTLQGGITAAMSGGSLVGSLVSGLLCDRLGRKTTIMSSCVFWMVGSIICCASQNVAMLIVGRVFNGLCVGFTSSQVPVYISEISRKDIRGKMVGCQQWSIEWGILIMYYIGYGCSFIKSNASFRIPWGLQMIPAVLLVILLPICPESPRWLASKGRWDECHEILAKIHAGGDKEDPTVLAEMLEIREVVEMEKSQTTSYLTLFNKKNWYRSHVGIFSQVWQQLVGGNVMMYYVVYVFQMAGLTGSVNLISSSIQYVIFLVFTFPVIFFIDHTGRRWLMIVGSIGMGTCIWIVGGLLKTYGEYAQSVGGNENIHVTLEHEYGASRAVLVFSYLFTMFYALTWAPTAWIYAPETFALHLRSRGTSSAAAGNWAMNFALAFYVPPAFDNIGWKTFAIFGVFCYVSAIHVFFCFPETARKTLEEIDELFAPDGPHAWNTHVGGAKIDILASELVDTKDKCEAEHVESIDENHNFA

SEQ ID NO: 302 - protein, 560 aa, Ogataea methanolica
MVGILKRAADSIRRWEVPERLLIENYVQDKNLIKSIVGLSALAIFFFGYDQGMMSGVNNSPDYVRRMKFGTWDEDGTITVTDSTKQGGIVAIYYFGTLCGCIAGGYFSDEFGRIKSIALGTVVAICGATLQGSAMQTSWMCGARYFTGIGTGILNAVVPVYSSECASHTSRGAFIAFEFTLNIFGVCVAYWLAYGLSYMGVMNEFRWRFPIFFQLIPLLFLIAIVLFFPESPRYLVKIGNYERAKRLLVRMRGAENGEQEFEEIIAAFEYEKDSALSTNYVRMFFDWYKGQPDAVSKAKKLHIARRIQLVIWLQILQEWIGIAGITVYQTDIFAQAGYGARKSQWLAAVNNTLYTISTLVAIYTIDKFGRRFANFWGLSTMGICMFLAGGLSRAQQLHPDNKAFGAAATSFVFIYTFIFGATLLMTPWILPSEIFPLKLRAAGNAMGVFGWSIGNGWLMLLSPVMFNAIHEKTLYIFGGCNFLTLIIVYFFYPETANRSLEDIDFLFASDSILASKCEAEFQKIIAERHEMLKENHELKSETKNIEKITEQENDSSDYVG

SEQ ID NO: 303 - protein, 520 aa, Candida succiphila
MVRLPKFYNPYLSAAVATIGGSLFGFDVSSMSAIIGTKQYIQYFDHPSSTLQGGITASMSGGSLIGSLISGQVCDHLGRKKTIIFSCAFWIVGSIICTAAQNTAMLIVGRVFNGLCVGFTSSQVPVYLSEISRKEIRGRLVGIQQWAIEWGILIMYYIGYGCSYIDGVASFRIPWALQMIPAVLLVVLLPMFPESPRWLASKGRWEETQEILAKIHAGGNEDDPLVIAEMMEIRETVELEQSSGNSYLTLFSKKNIYRTHVGIMAQVWQQLAGGNVMMYYVVYVFQMAGLDGEINLIASSIQYVVFLVFTVPVLFYIDHTGRRWLMIAGSLLMGTCIWIVGGLLNTYGEYVDSIGDNDNIHITLANNGPASKAVLVFSYLFTMFYALTWAPTAWVYAPEVFPLHIRSKGMAAAAAGNWAMNFALSFYVPPAFDNIGWKAFAIFGVFNFFMAFHIFLTFPETARKTLEEIDDLFAKDAPPAWKTHVGGAKLDLIIEEIRNDSGKAEAEHLESVDQHSLQSD

SEQ ID NO: 304 - protein, 545 aa, Candida carpophila
MTFARMAYEEKLVGPALKFRNFLDKTPNIYNPYVISIISCIAGMMFGFDISSMSAFVSLPAYVHYFNTPSAVIQGFITSAMALGSFFGSIASAFVSEPFGRRASLLTCSLFWMIGAAIQSSAQNRAQLIVGRIISGFGVGFGSSVAPVYGSEMAPRKIRGRIGGIFQLSVTLGIMIMFFISYGASFIKSAASFRLAWGLQIVPGLLMCIGIFFIPESPRWLAKQGHWDEAEIIVAKIQANGDREDPDVLIEISEIKEQLMLDENAKAFTYADLFSKKYLPRTITAMFAQIWQQLTGMNVMMYYIVYIFEMAGYGGNGVLVSSTIQYVIFVVVTFVSLFFLDKFGRRKILLAGAASMMAWQFGVAGILAQYSEPYDLSDTVKIKIPEQHKAAAKGVIACCYLFVASFGFSWGVGIWLYCSEVWGDSQSRQRGAAVSTASNWIFNFALAMFTPSSFKNITWKTYCIYATFCGCMFIHVYFFFPETKGKRLEEIAQIWEEKIPAWKTTKWQPHVPLLSDHELAEKMSTKHVERVNTREQSDNDEKSQV

SEQ ID NO: 305 - protein, 553 aa, Candida carpophila
MFSVPDSWLLENHYRGQSLTRLVVGLSALSIFFFGYDQGMMAGVNTSPDYVDKMKFGYYDSAGDVTVTDSTKQGGIVAIYYFGTLVGCLFGGFSSDRYGRIRAIGLGAFVAIFGAALQCSAQQVAWMCGARFVNGIGTGILNAVVPVYSSETAEHTSRGAFIAIEFTLNIFGVVVAYWLEYGLSYIDNGFTAFRWRFPIAFQIVPLLVLLAITWFFPESPRWLIKNNERERAKKLLISMRGEARGNEEFDQICEAMEFEEDSALTGNYFRMFFDYVKTNDPEQRRKAKSLHIARRIQIVIWLQIMQEWVGIAGVTVYQPEIFRQAGYTTRKSAWLSGLNNIFYMFATLINYFTVDRWGRRFTLYWGAIGQGVAMFLAGGFSKLQQLHPENKGYGAAAAAFVFVFTSVFGATWLAVPWLYPTEIFPLKVRAQGNAFGVVGWSIGNGWLTLLCPVMFKNIQEKTLYIFGACNFISIVLVYLFCPETANRTLEDIDFLFASKSWLASLAEKEFSAFQYARDKTGAHSIARIQTNDKVVVEESETTLKEDVATKPAV

SEQ ID NO: 306 - protein, 546 aa, Wickerhamia fluorescens
MGYEDKLVGPALKFRKFLDKFPNLHNVYLISLISCISGMMFGFDISSMSAFIGGGPDSPYEQFFELPGADIQGFITSCMALGSFFGSIISTFISEPFGRRASLLICAFLWSAGAAIQSGSQNRAMLMIGRIISGFGVGFGSSVAPVYGSELAPRKIRGMIGGLFQFSVTLGIMIMFYLSYGLSFIGGTKTFRIAWALQIVPGLILFFGCFFIPESPRWLAKHGYWDEAEQIVANVQAKGDRLNPDVLIEISEIKEQILIDENVRAFTYADLFNKKYIRRTFTAIFAQVWQQLTGMNVMMYYIVYIFKMAGYLDNANLVASSIQYVLNTVMTIPALYLLDKVGRRTMLMAGAVSMMIWQFAVAGLLASYSEPIKDLEPGATVTISIPDNRKDAAKAVIACCYLFVCSFATSWGVGIWVYCSEVWGDSASRQRGAAVATAANWILNFAIAMYSPSSFKNLAWKVYLIYGCMCFAMTIHVFFGFPETKGKRLEEIGQMWDEHVPAWRSSSWKPSVPILSDNELARKMLVEHKEGDLMHEAYSSNDEKVV

SEQ ID NO: 307 - protein, 547 aa, Priceomyces haplophilus
MGRFTIPQRFLLENHVQGKKLMHCVVAVSALSILFFGYDQGMMSGVNNTPDYVKTMNLGYYNQEGDVFITKSVKQGGIVAIYYFGTLWGCLFGGFVSDRLGRINSTALGALVAIVGASLQCSAQNTPWMCGARFVNGLGTGILNAVVPVYTSETVEHQTRGAFIAIEFTLNVFGCVIAYWLEYGLSYINGGFSVFRWRFPIAFQIIPLIFLFLVIWICPESPRWLVKNGDYEHAKRLLINMRESEDVGAKEFEEILAASKYEETSALSPNYFRMLLDYFTSKDPQKVAKVKSLHIARRVQIVIWMQIIQEWVGIAGITVYQPTIFRQAGFTQQKANWLSGLNNVFYCLSTLVNVFTVDRWGRRFTLFWGCIGQGISMFLAGGFSKLQQLHPTKKSYGAASASFVFIYTSIFGATWLVVPWLYPTEIFPLQVRAQGNAFGVVGWSIGNGWLTLLCPVMFDSIAEKTLYIFGACNFLAYVLVYFLCPETANRTLEDIDYLFASKSWLASKCEAEFLRIKESGLEASNVDEVSESESVLDKAEVEHASFT

SEQ ID NO: 308 - protein, 568 aa, Candida glabrata
MLFSKKKEDPQAVPEASPENDFSPSLSQQDSSASPYENDVKKLEEEAEQTPIVDIPKKPASAYVTVSIFCLFIAFGGFVFGWDTGTISGFVAQTDFIRRLGQKRADGTHYLSKVRTGLVVSIFNIGCAIGGVILSKLGDVYGRKPGLIIVVVIYVVGIVIQIATIDKWYQYFIGRIISGLGVGGIAVLSPMLISEVSPKHLRATLVACYQLMITLGIFLGYCTNFGTKNYSNSVQWRVPLGLCFAWAIFMISGMTFVPESPRFLVEKGRIEDAKRSIASSNKVSVDDPAVVAEVDSVQAAVEAERLAGSASWGELFSTKTKIFQRLVMGIMIQSLQQLTGDNYFFYYGTIVFKAVGLEDSFETSIVIGVVNFFSTFVGIFLVGRFGRRTCLLWGAATMTACMVVFASVGVTRLWPHGKGNGSSKGAGNCMIVFTCFYIFCFATTWAPLAFVICSETFPLRVKAKCMALAQASNWIWGFLISFFTPFITGAINFNYGYVFMGCLCFSYFYVFFFVPETKGLTLEEVNTMWEEGVLPWKASQWVPPSRRGADYDADALMHDDTPWYKRFL

SEQ ID NO: 309 - protein, 547 aa, Candida sojae
MKSPVELSLAGVALKISTFLDKLPKIYNVYFIASISTIAGMMFGFDISSMSAFIGSDSYMRFFDSPSSDIQGFITSAMALGSFFGSIASSFVSEPFGRRLSLIICAFFWMVGAAIQSSVQDRAQLIIGRIISGIGVGFGSSVATIYGAELAPRKIRGLIGGMFQFAVTLGILVMFYISFGLGHINGVASFRIAWGIQIVPGLLLFVGCFFIPESPRWLAKQNKWEEAEYIVARIQAKGNREDPDVLIEISEIKDQLLIEQAAKSVSYATLFTKKYYIRTLTAIFAQIWQQLTGMNVMMYYIVYIFQMAGYSGNANLVASSIQYVINTGITVPAILVVDRIGRRPVLITGAVLMMTFQFALAGILGQYSVPWADSGNDSVNIRIPDTNKSASKGAIACCYLFVASFASTWGPTIWIYCSEIWGDNRVAQRGNSLATAANWILNFAIGMYTPSGFKTISWKTYIIYGVMCFAMGIHVYFGFPETKGKRLEEIGQMWEEHVPAWRSRSWQPHIPIATDAELARKMEVEHKEGNLMKEDTNSEGEVKTESV

SEQ ID NO: 310 - protein, 362 aa, Streptococcus pneumoniae
MLPKYAQVKEEICSWLNQGKIQPDEKLPTENELMQQFGVSRHTIRKAIGDLVSQGLLYSVQGGGTFVASRTAKSAMHSNKTIGVITTYISDYIFPSIIRGIESYLSEQGYSMLLTSTNNNTESERRGLENLLSKNIDGLIVEPTKSALQTPNIGYYLNLEKNGIPFAMINASYAELAAPSFSVNDVKGGMMACEYVMSLGHTHIMGIFKADDKQGVKRMNGYLQAHRERGIFPSPDMIVTYTTEEKETVLLQKIKHTLEQNSGSYPTAILCYNDEIALKTINLLREFGLKVPDDVSIMGYDDSHFAQISEVKLTSVKHPKSIMGKAAAKYVIDCLEHKKPKKDDVVYEPELVIRNSVRRIGE

SEQ ID NO: 311 - protein, 570 aa, Lachancea quebecensis
MSSSATPMNNRSNNNTDLAIAGTATNLDSQSATPSNKMSDDAFDVKASPVGEAHEIPQKPLSEYILVMCLCLMVAFGGFVFGWDTGTISGFVNMTDFKRRFGDYNASTQEYYLSNVRTGLIVAIFNIGCAIGGLTLGRLGDMQGRRLGLMAVILVYVVGIVIQISASNKWYQYFIGRIVSGLGVGGIAVLSPTLISETAPKHLRGTCVSFYQLMITLGIFLGYCTNYGTKTYTDSVQWRLPLGLCFMWAIFMIGGMVFVPESPRYLIEKGRFEEAKRSIAKSNKLDTEDSGVLAEVDLINAGVEAEKLAGNASWGELFSPKGKILQRVIMGCVIQSLQQLTGNNYFFYYGTTIFQAVGLDDAFQTSIILGVVNFMSTFVGLYTVEKFGRRKCLLWGSAAMSVCFVVFASVGVTKLYPNGKDMPSSKSAGNAMIFFTCLFIFFFATTWAPIAYVIVSETYPLRVKNRAMAMSVGSNWIWGFLIGFFTPFITSAIGFYYGYVFMGCLVFSFFYVFFFVCETKGLTLEEVNEMYEEGVLPWKSESWVPAMRRDESYDVNETHEDGKPFYKRFV

SEQ ID NO: 312 - protein, 571 aa, Lachancea quebecensis
MSSAPYQQETAATATPVDLHSTVSNGSQLSTPSNKASRDELKAANMAEDAADQVDIPKKPASAYVTVVILCLMVAFGGFVFGWDTGTISGFVNQTDFLRRFGQKHKDGTHYLSNVRTGLIVAIFNVGCAFGGIILSKIGDVYGRRIGLMAVVVVYVVGIIIQIASIDKWYQYFIGRIISGLGVGGIAVLSPMLISETAPKHLRGAMVACYQLMITAGIFLGYCTNYGVKNYSNSVQWRVPLGLCFAWALFMITGMSFVPESPRYLIENGRIEDAKRSLAKSNKVTVEDPAILAEVDLILAGVEAERLAGSASIKELFSTKTKVLQRLIMGIMIQSLQQLTGDNYFFYYGTTIFKAVGLSDSFQTSIVIGIVNFASTFVSLVTVEKFGRRGCMLWGSAAMVACFVVYASVGVTRLYPNGADHPEVTNKGAGNCMICFTCFYIFCFATTWAPIAYVVVSESFPLRVKSKCMAIATASNWLWGFLIAFFTPFITSAIHFYYGYVFMGCLVFAYFYVFFFVPETKGLTLEEVQELWEEGVLPWKSTSWVPSSRRGKDYNVEDLKHDDKPWYKRFT

SEQ ID NO: 313 - protein, 522 aa, Candida intermedia
MGLEDNRMVKRFVNVGEKKAGSTAMAIIVGLFAASGGVLFGYDTGTISGVMTMDYVLARYPSNKHSFTADESSLIVSILSVGTFFGALCAPFLNDTLGRRWCLILSALIVFNIGAILQVISTAIPLLCAGRVIAGFGVGLISATIPLYQSETAPKWIRGAIVSCYQWAITIGLFLASCVNKGTEHMTNSGSYRIPLAIQCLWGLILGIGMIFLPETPRFWISKGNQEKAAESLARLRKLPIDHPDSLEELRDITAAYEFETVYGKSSWSQVFSHKNHQLKRLFTGVAIQAFQQLTGANFIFYYGTTFFKRAGVNGFTISLATNIVNVGSTIPGILLMEVLGRRNMLMGGATGMSLSQLIVAIVGVATSENNKSSQSVLVAFSCIFIAFFAATWGPCAWVVVGELFPLRTRAKSVSLCTASNWLWNWGIAYATPYMVDEDKGNLGSNVFFIWGGFNLACVFFAWYFIYETKGLSLEQVDELYEHVSKAWKSKGFVPSKHSFREQVDQQMDSKTEAIMSEEASV

SEQ ID NO: 314 - protein, 492 aa, Penicillium vulpinum
LFGFDISSMSAWIGVDTYTDYFGSPDSNLQGGITASMSAGSFAGSIAAGWLADILGRRYALMIASLVWIVGAMVQCSAQNVTHLVAGRVISGLAVGVTSSQTCVYLSELAPARIRGRVVGIQQWAIEWGILIMYLIAYGCVVGVSGPAAFRICWGVQAIPGLILFIALFFFPESPRWLASQERWEEALDTLAIIHANGDRHDPVVQVEFEEVQEAVRVAHESQGVTFLALFGPRVWKRTMCGMSVQMWQQLLGGNVAMYYVVYIFEMAGMTGNTTLWSSAIQYVIFLVTTGVMLPFIDRVGRRKLLLLGAVICMVLHFIIAGVMASKGKAVPNVNGNANLTWEIKGSAGMTVIAFSYIFTGIYGLTWAPTAWIYAAEVFPLKYRAKGVGLSAATNWIFNFALAYFVAPAFHNIQWKTYIIFGVFCTVMTFHVFFTYPETVGRSLEEIDLVFETDIKPWRTHEMGDMFREEIERREKVSVKMETSGATHEEVV

SEQ ID NO: 315 - protein, 560 aa, Ogataea methanolica; identical to SEQ ID NO: 302

SEQ ID NO: 316 - protein, 516 aa, Schwanniomyces occidentalis
YEDKLVAPALKFRKFLDQFPNILNVYVIAMISCISGMMFGFDISSMSAFIGTDQYQNFFDSPSSEMQGFISSAMALGSFFGSLATTFISEPFGRRASLILCAFFWMVGAAIQSSSQNRAQLIIGRFISGFGVGFGSSVAPVYGSEMAPRKIRGFIGGIFQFSVTLGILIMFYMSYGLHFIDGVGSFRIAWGLQIVPGLLLFFGCFFLPESPRWLAKQGYWDEAETIVANIQAKGNREDPDVLIEISEIKDQILVDENIRAFTYADLFRKKYIKRTTTAVFAQIWQQLTGMNVMMYYIVYIFEMAGYSGNANLVASSIQYVLNTVTTVPALFLMDKIGRRPLLLGGALMMMAWQFAVAGLLATYSEPRAAVDGNDTVTIEIPKSNKPAARGVIACCYLFVVSFASTWGVGIWVYCSEVWGDNASRQRGAAVSTAANWIFNFAIAMYTPASFKNITWKTYCIYATFCACMFIHVYFGFPETKGKRLEEIGQLWDENVPAWRSASWQPHIPLLSDAELG

SEQ ID NO: 317 - protein, 554 aa, Kluyveromyces marxianus
MTLLDKLLLRNIEYKGTFYSKFPQLTNIYAIGTIACISGLMFGFDISSMSSMIGTKKYKEYFNHPNATAQGGITGAMAAGSFLGSLLSPNFSDTFGRKLSLHICSILWIVGSIIQSAAQDEAMLIVGRVIAGMGVGFGSSVAPVYCSEISPPKIRGLISGLFQFSITVGIMLLFYIGYACHFIKGTASFRLTWGLQMIPGFVLIVGTLFLPESPRWLANHDRWEETIQIVANVVSKGDVEDEQVKFQLEEIKEQVIIDAQAKNFGFKDLWRPKTRRKIIVGICAQMWQQLCGMNVMMYYIVYIFNMAGYTGNSNLVASSIQYVLFVLVTFPALFLIDKIGRRPVLVAGGVFMFSWLFAVAGLLATYSEPAPQGVDGDTTVTIRIPDKHKSAAKGVIACSYLFVCSFAPTWGIGIWIYCSEIFNNMERAKGSAVTTATNWAFNFALAMFVPSAFKNISWKTYIIFGVFSVALTVQCFFMFPETRGKTLEEIDQMWVDNIPAWKTGSYIPQLPIIEDEEGNKLGLLGNVEYVERVNSKEEGLILQSSVTDSNSQSN

SEQ ID NO: 318 - protein, 492 aa, Aspergillus oryzae
LFGFDVSSMSAWIGTKQYLDYFNSPDSNLQGGITASMSAGSFAGAIAAGWVSDIVGRRMSLMIASVIWIIGAVLQLSAQNVAHLVVGRVVSGLSVGITSSQVCVYLAELAPARIRGRIVGIQQWAIEWGILIMYLISYGCGKGIAGPASFRVAWGIQAVPGLILLLALPFFPESPRWLASKERWEESLDTLAMLHGNGDRNDPVVQVEWEEVQEAVRIAQEAKDVTFLALFGPKIWMRTMCGVSVQVWQQLLGGNVAMYYVVYIFTMAGMDNNATLYSSAIQYVIFLVTTGVILPYIDRIGRRFLLLSGAVTCMILHYAIAGVMASYGNPVDEIDGNKNLRWEIKGAPGKAVIALSYIFVGVYGLTWAPTAWIYASEVFPLKYRAKGVGLSAAGNWIFNFALAYFVAPAFTNIKWKTYIIFGVFCTVMTFHVFFLYPETSRRSLEEIDLMFESNVKPWQSNKLQDKFGEEIARRQQSVSDEKAADASHQEVA

SEQ ID NO: 319 - protein, 541 aa, Spathaspora arborariae
MSSKLDRAFSKPALKVRSFLDHFPNIYNVYIIAMFSTIAGMMFGFDISSMSAFIGTDSYIRFFDNPGSTIQGFITSCMALGSFFGSIASSFISEPFGRRLSLLVCSFFWMIGAAIQSSAQNRAQLIIGRLISGLGVGFGSSVAPIYGAELAPRKIRGLIGGLFQFSVTLGILIMFYISYGLGKINGVASFRIAWGIQIVPGLILFVGCFFIPESPRWLAKQGNWDDCEYIVARIQAQGDREHPDVLVEIGEIKEQLLIEESSKSIGYATLFKRKYIRRTLTAIFAQIWQQLTGMNVMMYYIVYIFQMAGYSGNANLVASSIQYVLNTCTTVPALFLFDRIGRRPLLIGGAIFMMIFQFGVAGILATYSVPWPDSGNESVTIRIPEENKTASRGVIACCYLFVCSFASTWGVGIWVYCSEIWGDSRISQRGNALSTAANWIINFAIAMYTPSGFKNISWKTYIIYGVFCIVMGIHVLVGFPETRGKRLEEIGQMWDENVPAWRSGSWQPHIPATSDAEIARKLSLEHKEGELLAETNSETKV

SEQ ID NO: 320 - protein, 522 aa, Clavispora lusitaniae
MGLENSKIVRRFINVGEKKAGSTSMGILVGAFAAFGGVLYGYDTGTISGVMAMDYVKERFPSNKHKFSSSESSLIVSILSVGTFIGAITAPFVTDTLGRRWCIILSSLIVFNLGAALQTAATGIPLLCVGRVIAGLGVGLISSTIPLYQSEATPKWIRGAVVSCYQWAITIGIFLAAVFNQATHKMDSSASYRIPLGLQMIWSIILGVGMIFLPETPRFYVSKGEHEKARKSLSILRKLPSDHPDLVEELDDIKAAYEFEIEYGKSSWSQVFSNKNHQLKRLSTGVLCQAFQQLTGVNFIFYFGTSFFQSAGVNGFVTSLATNIVNVGSTVPGILLMEIVGRRNILLVGAAGMSFSQFVVAIVGVAGSGHAAKQCLVAFSCIFIAFFAATWGPTAWVVVGELFPLRTRAKSVALCAASNWLWNWAIAFATPYMVEPDKGNLGSKVFFIWGGCNFLCFLFAWYSIYETKGLSLEEVDELYEKVDKAWKSPGFVPSEHAFRRETEVLPDTDDKAEAVSVEEVSV

SEQ ID NO: 321 - protein, 542 aa, Spathaspora passalidarum
MPSKLDVYCAKPALQVRTFLDKFPKIYNVYFIAMISTIAGMMFGFDISSMSAFIGTESYINFFDNPGSTIQGFITSCMALGSFFGSIASSFISEPFGRRLSLMVCSFLWMVGAAIQSSSQNRAQLIIGRIISGVGVGFGSSVAPIYGAELAPRKIRGLIGGLFQFSVTLGILIMFYLSYGLGHIHGVASFRISWGLQIVPGLLMFFGVFIIPESPRWLAKQDLWDQAEDIVARIQAKGDKEHPDVLVEIGEIKEQLLIEESAKSIGYATLFRKKYLRRTLTAIFAQIWQQLTGMNVMMYYIVYIFQMAGYSGNANLVASSIQYVLNTATTVPALFLFDRIGRRPLLVGGAIFMMIFQFGVAGILATYSVPWPDSGNESVTIRIPEDNKTASRGVIACCYLFVCSFASTWGVGIWVYCSEVWGDSRISQRGNALSTAANWIINFAIAMYTPSGFKNISWKTYIIYGVFCIVMAIHVFFGFPETRGKRLEEIGEMWDSNVPAWRSGSWEPHIPATSDAEIARKLSLEHKEGGLMEDSNSSADRV

SEQ ID NO: 322 - protein, 492 aa, Penicillium chrysogenum
LFGFDVSSMSAWIGVDTYTDYFDSPDSNLQGGITASMSAGSFAGSIAAGWLADILGRRYALMIASLVWIVGAVVQCSAQNVTHLVAGRVVSGLAVGVTSSQTCVYLSELAPARIRGRIVGIQQWAIEWGILIMYLIAYGCVVGVSGPAAFRICWGVQAVPGLILFIALFFFPESPRWLASQERWEEALDTLAIIHANGDRHDPVVQVEFEEVQEAVRVAHESRDVSFMALFGPRVWKRTMCGMSVQMWQQLLGGNVAMYYVVYIFEMAGMTGNTTLWSSAIQYVIFLVTTGCMLPFIDRVGRRNLLLIGSVTCMVVHYIIAAVMASKGKPVPDVNGNANLTWEIKGSAGMTVIAFSYIFTGIYGLTWAPTAWIYAAEVFPLKFRAKGVGLSAATNWIFNFALAYFVAPAFHNIQWKTYIIFGVFCTVMTFHVFFMYPETVGRSLEEIDLVFETDVKPWRTHKIGDIFGEEIERRKELGAKTETGGATHEEVV

SEQ ID NO: 323 - protein, 551 aa, Kluyveromyces wickerhamii
MSLKNWLLFKDIKYEGTFYKKFPNIHNIYVIGMIACISGLMFGFDISSMSSMIGTDVYKNYFSHPDSLTQGGITASMAGGSFLGSLISPNFSDAFGRKVSLHICSCLWIIGTVLQCASQDQAMLIVGRVISGMGIGFGSSVAPIYCSELSPPNIRGTVSGLFQFSVTVGIMILFYVGYGCHFIDGTAAFRITWGLQMIPGFVLLVGVFFIPESPRWLANHNRWEETASVVANVIANGDINNEQVQFQLEEIKEQVIIDEAAKNFSFKDLFRKKTLPKTIVGISAQMWQQLCGMNVMMYYIVYIFNMAGYSGNSNLVASSIQYVLNVIMTIPALFLIDKAGIRPVLIIGGILMFTWLFSVAGILATYSVSVPGGVNGDDTVTIRIPDSHKSAAKGVIASSYLFVCSFAPTWGIGIWIYCSEIFNNMERAKGSAVSAATNWAFNFALAMFVPSAFKNISWKTYIIFGVFSVALTIQTFFMFPETKGKTLEEIDQMWADNIPAWKTSSYVPQLPVLEDDEGRKLGLLGNPQHLEDVKSNEKGLIDHSESNSNSN

SEQ ID NO: 324 - protein, 555 aa, Kluyveromyces aestuarii
MSLIDLLLFRNVQYEGKFYKKFPQIYNIYVIGVIACISGMMFGFDISSMSSMIGTQVYKDYFDSPDSLTQGGITASMAGGSLLGSLISPNFSDAYGRKVSMHVCSALWIIGAILQCAAQDQAMLIVGRVISGMGIGFGSSSAPVYCAEVAPPKIRGLISGLFQFSVTIGIMILFFIGYGCHFINGAAAFRVTWGLQIVPGLVLLVGLFFVPESPRWLANHDRWDETRTIVANIAANGDIEDEQVIFQLDEIKEQVLIDEAAKNFSYKDLFRKKTLPKTIVGVSAQMWQQLCGMNVMMYYIVYIFNMAGFTGNTNLISSAIQYVLNVIMTIPALFLIDKVGRRPLLIVGGILMFSWLFAVAGLLATYSVPVPGGVDGDTTVNIRIPDSSKSAANGVIACSYLFVCSFAPTWGVGIWIYCSEIFNNMERAKGSALSTATNWAFNFALAMFVPSAFRNISWKTYIIFGVFSVALTIQTFFMFPETRGKTLEEIDQMWADNIPAWKTSSYVPQLPVLEDEEGHKLGVMGNAQHLEYNKSTEKALLEKSDSNSNSNISSN

SEQ ID NO: 325 - protein, 546 aa, Saccharomyces kudriavzevii
MISRNVSVLGASTKASPSPVRKDEVQLTPEVKEASLDIPYKPIIAYWTVMGLCLMIAFGGFIFGWDTGTISGFINQTDFKRRFGEVQRDGSFQLSDVRTGLIVGIFNIGCAVGGLTLGRLGDIYGRRIGLMWVILVYVVGIVIQIASTDKWYQYFIGRIVSGMGVGGVAVLSPTLISEISPKHLRGTCVSFYQLMITLGIFLGYCTNYGTKKYSNSIQWRVPLGLCFAWAVFMVVGMVMVPESPRYLVKKGRFEEARRSLARSNKVAVTDLGVISEVDAIVANMELERAVGNASWSELFSNKGAILPRVIMGVVIQSLQQLTGCNYFFYYGTTIFNAVGMEDSFETSIVLGVVNFASTFVALYIVDKFGRRKCLLCGSASMAVCFVIFATIGVTRLWPHGKDYPSSQNAGNVMIVFTCFFIFCFAITWAPIAYVIVAETYPLRVKNRAMAIAVGANWMWGFLIGFFTPFITRAIGFSYGYVFMGCLIFSYFYVFFFVCETKGLTLEEVNEMYEERIKPWKSGDWIPSSRRLAQSTSSTPLAIVDSK

SEQ ID NO: 326 - protein, 570 aa, Saccharomyces kudriavzevii
MSQDAAIADEAPVEHLSPADSASHSVFSSSSNKAENDELKAYGEGEEHEPVVEIPKKPASAYVTVSIMCIMIAFGGFVFGWDTGTISGFVNQSDFIRRFGMKHHDGTPYLSKVRTGLIVSIFNIGCAIGGIILSKLGDMYGRKIGLIVVVVIYIIGIIIQIASIDKWYQYFIGRIISGLGVGGIAVLSPMLISEVSPKHLRGTLVACYQLMITAGIFLGYCTNYGTKTYSNSVQWRVPLGLGFAWALFMIGGMTFVPESPRYLAEVGRIEEAKRSIAVSNKVAVDDPSVLAEVEGVLAGIEAEKLAGNASWGELFATKNKIFQRLIMGAMIQSLQQLTGDNYFFYYGTTIFKAVGLSDSFETSIVLGIVNFASTFVGIYVVDKYGRRTCLLWGAASMTACMVVYASVGVTRLWPNGQDQPSSKGAGNCMICFACFYIFCFATTWAPIPFVVNSETFPLRVKSKCMSIAQACNWIWGFLIGFFTPFITSAINFYYGYVFMGCLVFMYFYVLLVVPETKGLTLEEVNTMWEEGVLPWKSASWVPPSRRGADYNAEDLAHDDKPLYKRMFSTK

SEQ ID NO: 327 - protein, 547 aa, Saccharomyces kudriavzevii
MSEFAASHVESGSQQISINSTPVVKKLETDESPIQAKSEYTSAEIPAKPITAYWTVICLCLMIAFGGFVFGWDTGTISGFVNQSDFKRRFGQMKSDGTYYLSDVRTGLIVGIFNIGCAIGGLTLGRLGDIYGRRIGLMCVVLVYIVGIVIQIASSNKWYQYFIGRIISGMGVGGIAVLSPTLISETAPKHIRGTCVSFYQLMITLGIFLGYCTNYGTKDYTNSVQWRVPLGLGFAFAIFMIAGMLMVPESPRFLVEKGRYEDAKRSLAKSNKVTVDDPSIVAEMDTIMANVETERLAGNASWGELFSNKGAILPRVIMGIMIQSLQQLTGNNYFFYYGTTIFNAVGMKDSFQTSIVLGIVNFASTFVALYTVDKFGRRKCLLGGSAAMAICFVIFSSVGVTSLYPDGKDQPSSKAAGNVMIVFTCLFIFFFAISWAPIAYVIVAESYPLRVKNRAMAIAVGANWIWGFLIGFFTPFITSAIGFSYGYVFMGCLVFSFFYVFFFVCETKGLTLEEVNEMYVEGVKPWKSGNWIAKENRVYEEELETEA

SEQ ID NO: 328 - protein, 824 aa, Trichophaea saccata
MAAAASEGPHVFPAPFIVSPKTTHTHTLILLHGRGSDGPAFGSCVYIATPSSGFTFPALYPGLKFVFPTTAERYSTTFREVMKEWFDTVSLSFPEECSHLQREGLREAVAHINALIDVEIAAGVPEDNIILGGISQGCATALHVLLARGRRLGGFVGMSGWMPFASNIREICGLATGAGLRHNVALDTESESEDELEYGAPPMHIDTVLKMQKRPPRRTKYPVPTPEKQSEALAFIRRNLAVEVDTDTPGLEVLKTPVFLGHGDDDEVVEYKLGRNMYTTLKHGLGMDTRWKRYREFGHGYKVKTGSKLDLIQPGPAMWTCYNIYVLASFGTIGGGLFGFDISSMSAWIGTQSYTEYFHHPDENLQGGITASMSAGSWIGALCAGFLSDKIGRRKALMVASAFWIIGSVVSLSAQNVGHLIAGRIINGFCVGITSSQTPVYLAELSPKNIRGRVVGIQQWAIEWGILIMYFVSYGCHFINGPSGFRLAWGLQAIPATILIGALFFFPESPRWLASKDRWEECLDVLAHLHAGGNRDDPAVIAEYEEVREAQALIVQGKGMSWMGLFGPKMWQRTMVGVFAQVWQQMVGGNVMMYYIVYVFQMAGLTGNVNLVSSSIQYVIFLATTAVTLTMIDRVGRRPLFIYGGILLAAFNFAVAGLMANYGHHMDSVAGNSNIVWQVTGPPARGIIACTYLFVAVYGFTWAPCTWIYVSEIFPLQYRAKGAGLATSANWAFNFALAYFVPPAFHNIVWRTYIIFGVFCICGVIHSFLMFPETCGKTLEEIDQLFEAGIPAWKSSKVHSNLDERIHELEEKSQGTQIEKVEHS

SEQ ID NO: 329 - protein, 567 aa, Torulaspora delbrueckii
MSTQENTPVGHLTPRASGSHSVLSTPSNKAERDDAKDLNSMAAPEPAIDIPKRPASSYVGVSILCLMIAFGGFVFGWDTGTISGFVNLSDFLKRFGQRNSANTYLSKVRMGLIVSIFNIGCAIGGLVLSKIGDVYGRRIGLVAVTVIYVVGILIQICSFDKWYQYFIGRIISGLGVGGIAVLSPMLISEVSPKQIRGTLVSCYQLMITLGIFLGYCTNYGTKTYDDSTQWRVGLGLCFAWAIFMIAAMFFVPESPRYLVEVGNFEEAKRSLSRSNKVSVDDPALLAELDAISAGVEAERLAGNASIGELFSTKTKVFQRLIMGVMLQSLQQLTGDNYFFYYGTTIFKSVGLKDSFQTSIIIGVVNFFSTFVGIYCIERFGRRTCLLWGAASMVCCFVVFASVGVTKLWPEGPSHQDISSKGAGNCMIVFTMFFIFCFATTWAGGCYVIVSESFPLRVKSKGMAIATGANWLWGFLISFFTPFITGAINFYYGYVFMGCLVFSFFYVFFFVPETKGLTLEEVNTMWLEGVLPWKSASWVPPDRRGADYNAEEMAHDDKPMYKRLFSRN

SEQ ID NO: 330 - protein, 542 aa, Spathaspora passalidarum
MSSKIESAFSKPALKFRSFLDRFPNIYNVYVIAMFSTIAGMMFGFDISSMSAFIGTPSYIKFFDNPGSTIQGFITSCMALGSFFGSIASSFVSEPFGRRFSLLVCSFFWMVGAAIQSSSQNRAQLIIGRLISGIGVGFGSSVAPIYGAELAPRKIRGLIGGLFQFSVTLGILIMFYISYGLGKIDGVASFRIAWGIQIVPGLVLFVGCFFIPESPRWLAKQGNWEDAEYIVARIQAKGDREHPDVLVEIGEIKEQLLIEESAKSIGYATLFRKKYIRRTLTAIFAQIWQQLTGMNVMMYYIVYIFQMAGYSGNANLVASSIQYVLNTGTTVPALFLFDRIGRRPLLIGGAIFMMIFQFGVAGILATYSVPWPDSGNESVTIRIPEENKTASRGVIACCYLFVCSFASSWGVGIWVYCSEIWGDSRISQRGNALSTAANWIINFAIAMYTPSGFQNISWKTYIIYGVFCIVMGIHVVVGFPETRGKRLEEIGQMWDENVPAWRSSSWQPHIPATSDAEIARKLSLEHKEEGDLMAETNSDNQV

SEQ ID NO: 331 - protein, 573 aa, Saccharomyces kudriavzevii
MTIEENDNPVAQEQPQAADDLASTSSKDSHLSASSQKYSNDELKASGEGSEGSPNVLMEIPKKPMSEYVTVSLLCLCVAFGGFMFGWDTGTISGFVAQTDFLRRFGMKHKDGTYYLSNVRTGLVVAIFNIGCAFGGIILSKGGDVYGRKKGLLIVIFVYIVGIIIQIASITKWYQYFIGRIISGLGVGGIAVLCPMLISEIAPKHLRGMLVSCYQLMITAGIFLGYCTNYGTKNYSNSVQWRVPLGLCFAWSLFLIGALTVVPESPRFLCEVNRIEDAKHSIAKSNKVSAEDPSVQAELDLIMAGVEAEKMAGNASWGELFSTRTKVFQRLLMGVLVQMFQQLTGNNYFFYYGTIIFKSVGLNDSFQTSIVIGIVNFASTFFSLWTVEHLGRRKCLLLGAATMMACMVVFASVGVTRLYPNGKSHPSSKGAGNCMIVFTCFYIFCYATTWAPVAWVITAESFPLRVKSKCMALASASNWVWGFLIAFFTPFITSAINFYYGYVFMGCLVAMFFYVFFFVPETKGLSLEEIQELWEEGVLPWKSEGWVPLSRRDNNYDLEDLQHDDKPWYKAML

SEQ ID NO: 332 - protein, 521 aa, Candida arabinofermentans
MVFGNRQMPKFYNPYMSAAVAAIGGSLFGFDVSSISAILGTDQYNTYFGQPSSIMQGGITAAMSGGSLIGSLLSGQVCDILGRKKTIIYSCGFWIIGSVLCCASQNVAMLIVGRVFNGLCVGFTSSQVPVYISELSRKDVRGKMVGIQQWSIEWGILIMYYIGYGCSYIKSNSSFRIPWGLQMIPAVLLVVLLPMFPESPRWLGSKGRWEEVHDTLAKIHAGGNREDPIVLAEIMEIREAVEIEQNSNASYLALFSRKNIYRTHVGIMAQVYQQLAGGNVMMYYVVYVFQMAGLTGSINLIASSIQYVVFLIFTFPVLFFIDKVGRRWLMIGGSISMGTCIWIVGGVLCNYGEYVDEVGGNKNIHITLKDSHHASVAVLFFSYLFTMFYSLTWAPTAWVYAPEVFPLYIRSKGMSAAAAGNWSMNFALSFYVPPAFDQIGWKTFAIFGVFNFFSAIHIYFGFPETGNKSLEEIDELFSKGGPRPWKTKVGHSHFDEKVEELVHEDEKPSADHVESVRSLDS

SEQ ID NO: 333 - protein, 570 aa, Lachancea thermotolerans
MSSSATPMNNRSNNNTDLAIAGTSTNLDSQSATPSNKMSDDAFDIKGSPAAEAHEIPQKPLSEYILVMCLCLMVAFGGFVFGWDTGTISGFVNMTDFKRRFGDYNTTTEEYYLSNVRTGLIVAIFNIGCAVGGLTLGRLGDMQGRRLGLMAVILVYVVGIVIQISASGKWYQYFIGRIVSGLGVGGIAVLSPTLISETAPKHLRGTCVSFYQLMITLGIFLGYCTNYGTKTYTNSVQWRLPLGLCFLWAIFMIGGMVFVPESPRYLIEKGRFEEAKRSIAKSNKLDTEDSGVLAEVDLINAGVEAEKLAGNARWGELFSPRGKILQRVIMGCVIQSLQQLTGNNYFFYYGTTIFQAVGLDDSFQTSIILGVVNFMSTFVGLYTVEKFGRRKCLLWGSAAMSVCFVVFASVGVTKLYPNGKDMPTSKSAGNAMIFFTCLFIFFFATTWAPIAYVIVSETYPLRVKNRAMAMSVGSNWIWGFLIGFFTPFITSAIGFYYGYVFMGCLVFSFFYVFFFVCETKGLTLEEVNEMYEEGVLPWKSESWVPALRRDESYDVNETHEDGKPFYKRFV

SEQ ID NO: 334 - protein, 571 aa, Lachancea thermotolerans
MSSAPYQQETAATATPVDLHSTVSNGSQLSTPSNKASRDELKAANMAEDAADQVEIPKKPASAYVTVVILCLMVAFGGFVFGWDTGTISGFVNQSDFLRRFGQKHSDGTHYLSNVRMGLIVAIFNIGCAFGGIILSKIGDVYGRRIGLMAVVVIYVVGIIIQIASIDKWYQYFIGRIISGLGVGGIAVLSPMLISETAPKHLRGAMVACYQLMITAGIFLGYCTNYGVKNYSNSVQWRVPLGLCFAWALFMITGMSFVPESPRYLIENGRIEDAKRSLAKSNKVTVEDPAILVEVDLILAGVEAERLAGSASIKELFSTKTKVLQRLIMGIMIQSLQQLTGDNYFFYYGTTIFKAVGLSDSFQTSIVIGIVNFASTFVSLVTVEKFGRRGCMLWGSAAMVACFVVYASVGVTKLYPNGADHPEVTNKGAGNCMICFTCFYIFCFATTWAPIAYVVVSESFPLRVKSKCMAIATASNWLWGFLIAFFTPFITSAIHFYYGYVFMGCLVFAYFYVFFFVPETKGLTLEEVQELWEEGVLPWKSTSWVPSSRRGKDYNVEELKHDDKPWYRRVV

SEQ ID NO: 335 - protein, 542 aa, Scheffersomyces stipites
MSYEDKLVQPALKFRTFLDRLPNIYNVYIIASISCISGMMFGFDISSMSAFIGEDDYKNFFNNPGSDIQGFITSCMALGSFFGSIVSSFISEPFGRRASLLLCSFFWMVGAAVQSSSQNRAQLMIGRIIAGFGVGFGSSVAPVYGSELAPRKIRGFVGGIFQFCVTLGILIMFYICYGLHFINGVGSFRIAWGLQIVPGLVLFVGCFFIPESPRWLAKHGYWDEAEFIVAQIQAKGNREDPDVLIEISEIKDQILIEENLKSFGYVDLFTKKYIRRTLTAIFAQIWQQLTGMNVMMYYIVYIFNMAGYSNNANLVASSIQYVLNTAATVPALFLMDYIGRRRLLIGGAIMMMIFQFGVAGILGKYSVPVPGGLPGNPTVTIQIPEDNKSAARGVIACCYLFVVSFASSWGVGIWVYCSEVWGDSASRQRGAAVSTAANWILNFAIAMYTPSSFKNITWKTYIIYAVFCLVMAIHVYFGFPETKGKRLEEVGQMWDENVPAWRSSSWQPTVPLLSDADLAHKMDVSHKEEQSPDAESSSEEKP

SEQ ID NO: 336 - protein, 557 aa, Debaryomyces hansenii
MNSIFNYSGFVMKFTIPEKYLLENKVKGKKLTHCVVALSALAIFFFGYDQGMMAGVNTSPDYVEKMKYGYFNENGDVTVTNSTRQGGIVAIYYFGTLVGCVFGGLFSDRHGRIKAIALGALIAIFGAALQCAAQQMSWMCGARFVNGIGTGILNAVVPVYSSETAEHTSRGAFIAIEFTLNIFGVCVAYWLEYGLSYIDSGFSAFQWRFPIAFQIIPLLVLLGIVWFFPESPRWLVKNGEEDHAKRILLNMRGVERGNQEFAEIVGAMRFEQESALSSSYWRMFLGYFPDKDSKKSAKAKTLHIARRVQIVIWMQIFQEWVGIAGVTVYQPEIFKQAGFGTRKSAWLSGVNNIFYCLSTLINFFTVDRFGRRFTLFWGAIGQGISMFLAGGFSKLQQKNPKNSSYGAAAASFVFIYTSIFGATWLAVPWLYPTEIFPLKVRAQGNAFGVVGWSIGNGWLTLLCPIMFSKIGEKTLYIFGACNFISLALVYLFCPETANRTLEDIDYLFANDSWLASKSEADFKRIKIEQVDKQVGREKQIIDIDSSEKENFLTEHFE

SEQ ID NO: 337 - protein, 567 aa, Torulaspora delbrueckii
MSTTEHTPVDHLSPAVSASGSGLSTPSNKAERDDIKDFDAAADREAAVDIPKRPASSYIGVSILCLMVAFGGFVFGWDTGTISGFVNLSDFLQRFGQRSKDGVYYLSKVRMGLIVSIFNIGCAIGGIILSKIGDIYGRRIGLVAVTVIYVVGILIQICSFNKWYQYFIGRIISGLGVGGIAVLSPMLISEVSPKQIRGTLVACYQLMITLGIFLGYCTNYGTKTYNDSTQWRVGLGLCFAWAIFMIGGMLFVPESPRYLVEHGNIEEAKRSLSRSNKLSVDDPAVLAELDAISAGVEAEKLAGSASWGELFSTKTKVFQRLIMGVMLQSLQQLTGDNYFFYYGTTVFKSVGLKDSFQTSIIIGVVNFFSTFVGIFCIERFGRRTCLLWGAASMVCCFVVFASVGVTKLWPEGPSHQDISSKGAGNCMIVFTMFFIFCFATSWAGGCYVIVSESFPLRVKSKGMAIATAANWLWGFLIAFFTPFITGAINFYYGYVFMGCLVFGYFYVFFFVPETKGLTLEEVETMWLEGVLPWKSAAWVPPDRRGADYNAEEMAHDDKPMYKRFFSK

SEQ ID NO: 338 - protein, 555 aa, Candida glabrata
MSQSAISSTSATDPERQTPETKLEGEDFQLKADEASIQGAEIPRKPLGAYWTVMCLCLMIAFGGFVFGWDTGTISGFVAQTDFKRRFGQRHSDGTYYLSNVRTGLIVAIFNIGCAFGGLTLGRTGDLYGRKKGLVIVVSVYVVGIIIQIASVDKWYQYFIGRIISGLGVGGIAVLSPTLISETAPKHLRGTCVSFYQLMITLGIFLGYCTNYGTKNYSNSVQWRVPLGLCFAWALFMIGGMSMVPESPRFLVEKGRLEEARRSIAISNKLSMDDPGVTFELDTISAGVEAERLAGSASWGELFSNKGKILPRVIMGVMIQSLQQLTGNNYFFYYGTTIFKAVGLEDSFQTSIVLGIVNFASTFVGLWTVERFGRRRCLLWGSATMAACFVIFASVGVKSLYPHGRDHASSKGAGNCMIVFTCFFIFCFATTWAPIAYVIVSETYPLRVKNRAMAIAVGSNWIWGFLIGFFTPFITSAINFSYGYVFMGCLVFSYFYVFFFVCETKGLTLEEVNDMYEEGVLPWKSPNWVPPSRRDASYDIDAMMHDDKPWYKRFL

SEQ ID NO: 339 - protein, 564 aa, Candida glabrata
MSQAQSLSPSESAENSPVREVNVANSFKDDDFILEQKQTADVSAMSPEAEAPPKPISAYFTVICLCLMIAFGGFVFGWDTGTISGFVAQTDFKRRFGQQAADGSYYLSDVRTGLIVAIFNIGCAIGGLTLGRLGDMYGRRLGLMAVITVYVVGIVIQISSTTTWYQYFVGRIVSGLGVGGIAVLSPTLISETAPKHLRGTCVSFYQLMITLGIFLGYCTNYGTKTHTNSIQWRVPLGLCFAWALFMLVGMSMVPESPRFLVEKGRFEEARRSLARSNKVSMDDPIVTAEIENISAGVEAEKSAGNASWGELFSTKGKILQRVVMGIMIQSLQQLTGCNYFFYYGTTIFKAVGLEDSFQTSIILGIVNFASTFVALYVVDRFGRRKCLLWGSSTMAVCMVIFASVGVKSLYPNGKDQPSSTTAGNVMIVFTCLYIFCFATTWAPTAYVIVAETYPLRVKNRAMAIAVGFNWIWGFLIGFFTPFITTAINFYYGYVFMGCLVFSFFYVFFFVCETKGLTLEEVNEMYEEGVLPWKSAQWLPTTKRTSGYDVDAALHDDKPWYKRFA

SEQ ID NO: 340 - protein, 552 aa, Candida glabrata
MSDQESRSQSVLSASNSKADREDEFKAYVDEEGQPMVEIPKKPASAYVSISIFCLFIAFGGFVFGWDTGTISGFVAQTDFIRRLGQTRANGTHYLSKVRTGLVVSIFNIGCAIGGIVLSKLGDMYGRKIGLISVVVIYIVGIVIQIATIDKWYQYFIGRIISGLGVGGIAVLSPMLISEVSPKHMRGSLVSCYQLMITCGIFLGYCTNYGTKNYSNSVQWRVPLGLCFAWALFMIGGMTFVPESPRYLIEVGRVEEARRSIAISNKVSPDDPAVTFEVENVQAAVEAERLAGSASWGELFSTKTKVFQRLIMGIMIQSLQQLTGDNYFFYYGTTVFKAVGLEDSFETSIVIGIVNFASTFVALYVVDRFGRRRCLLWGAAAMTACMVVFASVGVTRLWPNGQDQPSSKGAGNCMIVFTCFYIFCFATTWAPIPFVVNSETFPLRVKAKCMAIAQASNWIWGFLIAFFTPFITNAINFYYGYVFMGCLCFSYFYVFFFIPETKGLTLEEVNTLWEEGVLPWKSPNWVPPSKRDASYDADAMMHDDKPWYKRFV

SEQ ID NO: 341 - protein, 539 aa, Pichia guilliermondii
MAYEDKLVAPALKFRNFLDKTPNIYNPYIISIISCIAGMMFGFDISSMSAFVSLPAYVNYFDTPSAVIQGFITSAMALGSFFGSIASAFVSEPFGRRASLLTCSWFWMIGAAIQASSQNRAQLIIGRIISGFGVGFGSSVAPVYGSEMAPRKIRGRIGGIFQLSVTLGIMIMFFISYGTSHIKTAAAFRLAWALQIIPGLLMCIGVFFIPESPRWLAKQGHWDEAEIIVAKIQAKGDRENPDVLIEISEIKDQLMVDENAKAFTYADLFSKKYLPRTITAMFAQIWQQLTGMNVMMYYIVYIFEMAGYGGNGVLVSSTIQYVIFVVVTFVSLFFLDKFGRRKILLVGAASMMTWQFAVAGILARYSVPYDLSDTVKIKIPDNHKSAAKGVIACCYLFVASFGFSWGVGIWLYCSEVWGDSQSRQRGAAVSTASNWIFNFALAMFTPSSFKNITWKTYCIYATFCACMFIHVFFFFPETKGKRLEEIAQIWEEKIPAWKTTNWQPHVPLLSDHELAEKINAEHVENVNSREQSDDEKSQV

SEQ ID NO: 342 - protein, 509 aa, Phaseolus vulgaris
MEAPSPTKPIDPTKPSITTLSVEGSQGEPSPLRKMFAVASIAAGIQFGWALQLSLLTPYVQLLGVPHAAASFIWLCGPISGLVVQPIVGYYSDRSTSRYGRRRPFILGGAVAVAIAVFLIGYAADIGYSAGDDITKKTRPRAVAVFVIGFWILDVANNMLQGPCRAFLADLAAGDQRKTRIANGFFSFFMAVGNVLGYAAGSFSGLHKIFPFTQTKACDVFCANLKSCFFFSILLLLFLSTVALIYVKDKPVAARAVQEDAQPSCFFQLFGALKELKRPMWMLMLVTAVNWIGWFPYFLFDTDWMGREVYGGTAGEDAYAEGVRVGSLGLMINAVVLGFMSLAVEPLDRMVGGVKRLWGIVNFILAIGFGMTVVITKMAEHQRHLNPAAVGHPSDGVKIGSMVFFAVLGVPLAITFSVPFALASIYSSASGAGQGLSLGVLNLAIVVPQMVVSALSGPWDALFGGGNLPAFMVGAAAAALSAIMAIVLLPTPKPADEAKAASMVAGGFH

SEQ ID NO: 343 - protein, 498 aa, Arabidopsis thaliana
MAVGSMNVEEGTKAFPAKLTGQVFLCCVIAAVGGLMFGYDIGISGGVTSMDTFLLDFFPHVYEKKHRVHENNYCKFDDQLLQLFTSSLYLAGIFASFISSYVSRAFGRKPTIMLASIFFLVGAILNLSAQELGMLIGGRILLGFGIGFGNQTVPLFISEIAPARYRGGLNVMFQFLITIGILAASYVNYLTSTLKNGWRYSLGGAAVPALILLIGSFFIHETPASLIERGKDEKGKQVLRKIRGIEDIELEFNEIKYATEVATKVKSPFKELFTKSENRPPLVCGTLLQFFQQFTGINVVMFYAPVLFQTMGSGDNASLISTVVTNGVNAIATVISLLVVDFAGRRCLLMEGALQMTATQMTIGGILLAHLKLVGPITGHAVPLIVLILICVYVSGFAWSWGPLGWLVPSEIYPLEVRNAGYFCAVAMNMVCTFIIGQFFLSALCRFRSLLFFFFGIMNIIMGLFVVFFLPETKGVPIEEMAEKRWKTHPRWKKYFKD

SEQ ID NO: 344 - protein, 534 aa, Yarrowia lipolytica
GLLTLPSFVKQFPKMDTSDYLPPDVKSFNTTIQGTAIAIYEIGCMMGALFTMWGGDKVGRRYIIFYGSIIMTIGAVLQCASYSLGMFITGRVVSGVGNGFITATVPMLQSECAKPEKRGKLVMLEGALITAGIALSYWIDFGFYWVKANDADWRFPVAFQIVFCLFLFFTVLTIPESPRWLVKKGRFEEAAGVFAALEDVDIEDPYVVTQITYVKESIMLEQLAQLGIDGPAAREKIAAGEFSMGEELPFLSQMKLMFTFGKKKNFHRTMLAYWSQVMQQITGINLITYYAAYIYETSVGMTPTNSRILAACNGTEYFLASWIAFYTIERFGRRKLMIFGAAGQAATMAILTGCVYAASSPADGGLDNQSAGVAAAVFLFVFNTFFAIGWLGMSWLYPAEISSLEIRAPANGLSTSGNWVFNFMVVMITPVAFDTIKWKTYIIFAVINAAMVPVVYFFYPETAGRSLEEIDQIFADSNPKTPWDVVWIARRLPKSTAVDHNLVEPRILLEEKTALETVESVSPTPSDQEETRHV

SEQ ID NO: 345 - protein, 362 aa, Bacillus subtilis
MLPKYAQVKEEISSWINQGKILPDQKIPTENELMQQFGVSRHTIRKAIGDLVSQGLLYSVQGGGTFVASRSAKSALHSNKTIGVLTTYISDYIFPSIIRGIESYLSEQGYSMLLTSTNNNPDNERRGLENLLSQHIDGLIVEPTKSALQTPNIGYYLNLEKNGIPFAMINASYAELAAPSFTLDDVKGGMMAAEHLLSLGHTHMMGIFKADDTQGVKRMNGFIQAHRERELFPSPDMIVTFTTEEKESKLLEKVKATLEKNSKHMPTAILCYNDEIALKVIDMLREMDLKVPEDMSIVGYDDSHFAQISEVKLTSVKHPKSVLGKAAAKYVIDCLEHKKPKQEDVIFEPELIIRQSARKLNE

SEQ ID NO: 346 - protein, 551 aa, Kluyveromyces lactis
MSLKNWLLLRDIQYEGTFYKKFPHVYNIYVIGFIACISGLMFGFDIASMSSMIGTDVYKDYFSNPDSLTYGGITASMAGGSFLGSLISPNFSDAFGRKVSLHICAALWIIGAILQCAAQDQAMLIVGRVISGMGIGFGSSAAPVYCSEISPPKIRGTISGLFQFSVTVGIMVLFYIGYGCHFIDGAAAFRITWGLQMVPGLILMVGVFFIPESPRWLANHDRWEETSLIVANIVANGDVNNEQVRFQLEEIKEQVIIDSAAKNFGYKDLFRKKTLPKTIVGVSAQMWQQLCGMNVMMYYIVYIFNMAGYTGNTNLVASSIQYVLNVVMTIPALFLIDKFGRRPVLIIGGIFMFTWLFSVAGILATYSVPAPGGVNGDDTVTIQIPSENTSAANGVIASSYLFVCFFAPTWGIGIWIYCSEIFNNMERAKGSALSAATNWAFNFALAMFVPSAFKNISWKTYIIFGVFSVALTIQTFFMFPETKGKTLEEIDQMWVDNIPAWRTANYIPQLPIVKDEEGNKLGLLGNPQHLEDVHSNEKGLLDRSDSASNSN

SEQ ID NO: 347 - protein, 546 aa, Saccharomyces cerevisiae
MVSSSVSILGTSAKASTSLSRKDEIKLTPETREASLDIPYKPIIAYWTVMGLCLMIAFGGFIFGWDTGTISGFINQTDFKRRFGELQRDGSFQLSDVRTGLIVGIFNIGCALGGLTLGRLGDIYGRKIGLMCVILVYVVGIVIQIASSDKWYQYFIGRIVSGMGVGGVAVLSPTLISEISPKHLRGTCVSFYQLMITLGIFLGYCTNYGTKKYSNSIQWRVPLGLCFAWAIFMVIGMVMVPESPRYLVEKGKYEEARRSLAKSNKVTVTDPGVVFEFDTIVANMELERAVGNASWHELFSNKGAILPRVIMGIVIQSLQQLTGCNYFFYYGTTIFNAVGMQDSFETSIVLGAVNFASTFVALYIVDKFGRRKCLLWGSASMAICFVIFATVGVTRLWPQGKDQPSSQSAGNVMIVFTCFFIFSFAITWAPIAYVIVAETYPLRVKNRAMAIAVGANWMWGFLIGFFTPFITRSIGFSYGYVFMGCLIFSYFYVFFFVCETKGLTLEEVNEMYEERIKPWKSGGWIPSSRRTPQPTSSTPLVIVDSK

SEQ ID NO: 348 - protein, 570 aa, Saccharomyces cerevisiae
MSQDAAIAEQTPVEHLSAVDSASHSVLSTPSNKAERDEIKAYGEGEEHEPVVEIPKRPASAYVTVSIMCIMIAFGGFVFGWDTGTISGFINQTDFIRRFGMKHKDGTNYLSKVRTGLIVSIFNIGCAIGGIILSKLGDMYGRKVGLIVVVVIYIIGIIIQIASINKWYQYFIGRIISGLGVGGIAVLSPMLISEVSPKHLRGTLVSCYQLMITAGIFLGYCTNFGTKNYSNSVQWRVPLGLCFAWALFMIGGMTFVPESPRYLAEVGKIEEAKRSIAVSNKVAVDDPSVLAEVEAVLAGVEAEKLAGNASWGELFSSKTKVLQRLIMGAMIQSLQQLTGDNYFFYYGTTIFKAVGLSDSFETSIVLGIVNFASTFVGIYVVERYGRRTCLLWGAASMTACMVVYASVGVTRLWPNGQDQPSSKGAGNCMIVFACFYIFCFATTWAPIPYVVVSETFPLRVKSKAMSIATAANWLWGFLIGFFTPFITGAINFYYGYVFMGCLVFMFFYVLLVVPETKGLTLEEVNTMWEEGVLPWKSASWVPPSRRGANYDAEEMTHDDKPLYKRMFSTK

SEQ ID NO: 349 - protein, 567 aa, Saccharomyces cerevisiae
MSGVNNTSANDLSTTESNSNSVANAPSVKTEHNDSKNSLNLDATEPPIDLPQKPLSAYTTVAILCLMIAFGGFIFGWDTGTISGFVNLSDFIRRFGQKNDKGTYYLSKVRMGLIVSIFNIGCAIGGIVLSKVGDIYGRRIGLITVTAIYVVGILIQITSINKWYQYFIGRIISGLGVGGIAVLSPMLISEVAPKQIRGTLVQLYQLMCTMGIFLGYCTNYGTKNYHNATQWRVGLGLCFAWTTFMVSGMMFVPESPRYLIEVGKDEEAKRSLSKSNKVSVDDPALLAEYDTIKAGIELEKLAGNASWSELLSTKTKVFQRVLMGVMIQSLQQLTGDNYFFYYGTTIFKSVGLKDSFQTSIIIGVVNFFSSFIAVYTIERFGRRTCLLWGAASMLCCFAVFASVGVTKLWPQGSSHQDITSQGAGNCMIVFTMFFIFSFATTWAGGCYVIVSETFPLRVKSRGMAIATAANWMWGFLISFFTPFITGAINFYYGYVFLGCLVFAYFYVFFFVPETKGLTLEEVNTMWLEGVPAWKSASWVPPERRTADYDADAIDHDDRPIYKRFFSS

SEQ ID NO: 350 - protein, 556 aa, Kluyveromyces marxianus
MTLKDKLLLRNIEFKGTFYAKFPQIHNIYAIGVISCISGLMFGFDISSMSSMIGTETYKKYFDHPKSITQGGITASMSGGSFLGSLLSPAISDTFGRKVSLHICAVLWIVGCILQSAAQDQPMLIAGRVIAGLGIGFGSGSAPIYCSEISPPKVRGLITGLFQFSITVGIMILFYVGYGCHFLSGNLSFRLTWGLQVIPGFVLLVGVLFLPESPRWLANHDRWEETESIVAKVVAKGNVDDEEVKFQLEEIKEQVILDAAAKNFSFKDLLRPKTRKKLFVGVCAQMWQQLCGMNVMMYYIVYVFNMAGYTGNTNLVASSIQYVLNVLMTFPALFLIDKVGRRPVLIVGGIFMFTWLFAVAGLLASYSVPAPNGVNGDDTVTIRIPDKHKSAAKGVIACSYLFVCSFAPTWGIGIWIYCSEIFNNMERAKGSSVAAATNWAFNFALAMFVPSAFKNISWKTYIVFGVFSVALTVQTYFMFPETRGKTLEEIDQMWVDNIPAWKTSSYIPQLPIIEDEFGNKLGLLGNPQHLEHVKSVEKDTVVEKLESSEANSSSSV

SEQ ID NO: 351 - protein, 546 aa, Candida intermedia
MPDSVTTSTSPSSAPKPALFDEKDIEDSLPTLPKKQAKDYLLISILCFFVAFGGYVFGFDTGTISGFVNMDDFKRRFGQVNSSGEHYLSNVRTGLIVSIFNVGCAVGGIFLSKTGDVWGRRMGIMISMVIYIVGIIIQISSSTKWYQYFIGRLITGLGVGTVSVISPLFIGESSPKHLRGTLVCCYQLCVTMGIFLGYCTTFGTKNYSDSRQWRIPLGLCFAWALLLIFGMLNMPESPRFLIEKSRLDDAKLSIARSNKVSPEDPAVYTEIQLIQAGIDREALAGNAGWKELITGKPKIFQRVIIGIVLQSIQQLTGNNYFFYYGTTIFKAVGMSDSFQTSIVLGIVNFASTFVGIYAIERMGRRLCLLVGSACMSVCFLIYSILGSVNLYIDGYANTTENTRKPTGNAMIFITCLFIFFFASTWAGGVYTIVSETYPLRIRSKGMAVATSANWMWGFLISFFTPFITSAIHFYYGFVFTGCLIFSFFFVYFCLRETKGLSLEEVDELYASDVVPWKTSDWTPPSVNNMAQTTGFAAQAKPNVEQV

SEQ ID NO: 352 - protein, 566 aa, Lachancea quebecensis
MSAPEEKLDRASGSPVEGSTKPSSILSHDKLEIEKDRDLNDFPPQENEIELPKQPLSHYFSISILCLMIAFGGFIFGWDTGTISGFVNLPDFVRRFGSLNSKGVYYLSKVRMGLIISIFNIGCAVGGIVLSKIGDIYGRRIGLISVTIVYVVGIVIQISSTDKWYQYFIGRIISGLGVGGIAVLSPMLLSEVSPKHIRGMLVNLYQLMGTMGIFLGYCTNYGTKNYTDSTQWRVGLGLCFAWAILLVSGMMFVPESPRYLVEAGKLEEAKRSLSKSNKVSIDDPAITVELDAISAGVESERLAGDATWGELFSTKTKVLQRVTMGVMIQSLQQLTGDNYFFYYGTTIFKSIGLEDSFETSIIIGAVNFFSSFIAIYTIERFGRRTCLLWGAASMFCCFVVFASVGVTKLWPEGPDHSEISSKGAGNCMIVFTMFFIFSFATTWAGGCYVIVSETFPLRVKSKGMALSTAANWMWGFLIGFFTPFITGAINFYYGYVFMGCLIFAYFYVFFFVPETKGLTLEEVNIMWLESVPAWKSASWIPPTRRSADYVADTSNDKFTFKFFSKH

SEQ ID NO: 353 - protein, 494 aa, Aspergillus fischeri
LFGFDVSSMSAWIGTHQYLDYFNSPDSNLQGGITASMSAGSFAGAIAAGFISDRIGRRLSLLVASLVWIIGAVIQCSAQNVAHLVAGRVISGLSVGITSSQVCVYLAELAPARIRGRIVGIQQWAIEWGILIMYLVSYGCSEGVHSPAAFRIAWGVQAVPGLILAVALLFFPESPRWLASKERWEESLDTLALLHGHGDRNHPEVQVEWEEVQEAVRIAREAKDVSFFALFGPRVWKRTMCGVSVQVWQQLLGGNVAMYYVVYIFQMANMPGDTVLYSSAIQYVIFLVTTGVILPYIDRIGRRLLLLSGSIICMALHYAIAGIMATYGNPVDEIDGNKNLRWEIKGAAGKGVIACSYIFVGVYGLTWAPAAWIYASEVFPLKYRAKGVGLSAAGNWIFNFALAYFVAPAFTNIKWKTYIIFGVFCTVMTFHVFFMYPETARRSLEEIDMMFDSNVKAWQSHKVHDKFGEEIEKHRQQSVVEGEKPVDSVHAEVV

SEQ ID NO: 354 - protein, 461 aa, Lactobacillus rennini
MATEKKIPSSFIYFFGSFGGILFGYDIGVMTGALPFLQSDWNLTNASIVGWITSAVMFGAIFGGAAAGQLSDKFGRRKMILVSAIIFAVFSILSMVSPDNGQFYLIIVRILLGLAVGAASALVPAYMSEMAPARVRGSLSGLNQTMIVSGMLLSYIMDFFLKDLPEAWGWRLMLGLAAVPAIILYLGVLRLPESPRFLIKNGKVDQARRVLSYIRNDDEIDGEIKQIQETSSEEKAAYKQSSWASLFSGKYRYLVIAGVGVAAFQQFQGANAIFYYIPLIVEKATGNAASSALLWPIVQGVILVIGSLVYIAIAEKFKRRTLLMMGGTVMGLSFLLPSLINSVVKNANPMMIVVFLSIYVAFYSFTWAPLTWVLVGEIFPLAIRGRASGLASSFNWIGSWAVGLLFPVMTASMSQEAVFAIFGVICILGVLFIRFRVPETKGLTLEKIEEEGMKHGKKRQA

SEQ ID NO: 355 - protein, 464 aa, Arabidopsis lyrate
LMFGYDIGISGGVTSMDTFLLDFFPHVYEKKHRVHENNYCKFDDQLLQLFTSSLYLAGIFASFIASYVSRAFGRKPTIISASIFFLVGAILNLSAQNLGMLIGGRILLGFGIGFGNQTVPLFISEIAPAKYRGGLNVMFQFLITIGILAASYVNYLTSTLKNGWRYSLGGAAVPALILLIGSFFIHETPASLIERGKDEKGKQVLRKIRGVEDIELEFNEIKYATEVSTKVKSPFKELFTNRENRPPLVCGTLLQFFQQFTGINVVMFYAPVLFQTMGSGNNASLISTVVTNGVNAVATIISLVMVDLAGRKCLLVEGAIQMTATQMTIGGILLAHLKLVGPITGHAVPLIVLVLICIYVSGFAWSWGPLGWLVPSEIYPLEVRNAGYFCAVAMNMVCTFIIGQFFLSALCRFRSYLFFFFGVMNIAMGLFVVYYLPETKGVPVEEMAEKRWKTHSRWKKYFKD

SEQ ID NO: 356 - protein, 545 aa, Metschnikowia bicuspidata
MSQSQDELQSKLGVDTPINDSLFEAKEESPLAVLPEKHFKDYISISVFCLFVAFGGFVFGFDTGTISGFVNMSDFTTRFGQLNADGTYYLSDVRTGLLVSIFNVGCAVGGIFLCKIADVYGRRMGLMFSMVIYVVGIIIQISSTTKWYQYFIGRLIAGLAVGTVSVVSPLFISEVAPKQLRGTLVCCFQLCITLGIFLGYCTTYGTKSYSDSRQWRIPLGLCFAWALFLVAGMLNMPESPRYLVEKSRIEEARKSIARSNKVNEEDPAVYTEVQLIQAGIDREALAGKASWGELITGKPKILRRVIMGIMLQSLQQLTGDNYFFYYGTTIFQAVGLQDSFQTSIILGIVNFASTFVGIYAIERMGRRLCLLTGSACMFVCFIIYSLIGTQHLYKDGFSNDPSNTYKPSGDAMIFITCLYIFFFASTWAGGVYCIISESYPLRIRSKAMSVATAANWMWGFLISFFTPFITSAIHFYYGFVFTGCLLFSFFYVYFFVVETKGLSLEEVDILYASGTLPWKSSGWVPPSVEDMAKNTFESKPTDEHV

SEQ ID NO: 357 - protein, 509 aa, Cicer arietinum
MEVTSPSKSNHGDPMGSSLELDCVQPVGSPLRKMIAVASIAAGVQFGWALQLSLLTPYVQSLGVPHVWAAFIWLCGPISGLLVQPIAGYYSDRSTSRFGRRRPFIFCGSVAVGIAVFLIGYAADLGHSFGDNLSKKTRPRAVGFFVVGFWILDVANNMLQGPCRAFLADLAAGDEKMTRRANAFFSFFMAVGNILGYAAGSYSGLYKIFPFTETDACNIFCANLKSCFFFSILLLTFLAGIALVYVEDTPRLRAEVSDNNEQVSCFGHLFRALKELKRPMWMLMLVTCVNWIAWFPFFLFDTDWMGREVYGGDAGEKAYDTGVRFGSLGLMLNAVVLALMSLAVEPLGKMVGGIKRLWGIVNIILAIGLAMTVLITKMAEQERQLSGGATVGNPSKGVKAGAILFFAVLGIPCAITFSVPFALASIYCSASGAGQGLSLGVLNLAIVVPQMVVSTLSGPWDALFGGGNLPAFVAGAVAAVVSAILAIVLLPTPKPDDEAKATIASGSFH

SEQ ID NO: 358 - protein, 509 aa, Vigna angularis
MEAPSPTKPIDPTKPSITTLSVEASQAEPSPLRKMFAVASIAAGIQFGWALQLSLLTPYVQLLGVPHAAASFIWLCGPISGLVVQPIVGYYSDKSTSRFGRRRPFILGGAVAVAIAVFLIGYAADIGYSAGDDITKKTRPRAVGVFVIGFWILDVANNMLQGPCRAFLADLAAGDQRKTRIANGFFSFFMAVGNVLGYAAGSYSSLHKIFPFTQTKACDVFCANLKSCFFFSILLLLFLATVALIYVKDKPVPPRAVQEDAQPSCFFQLFGALKELKRPMWMLMLVTAINWVGWFPYFLFDTDWMGREVYGGTAGEDAYAKGVRVGSLGLMVNAVVLGFMSLAVEPLGRMVGGVKRLWGIVNFILAIGFGMTIVITKVAEHERHLNPAAVGHPSTGVTVGSMVFFAVLGVPLAITFSVPFALASIYSSASGAGQGLSLGVLNLAIVVPQMVVSALSGPWDALFGGGNLPAFMVGAAAAALSAIMAIVLLPTPKPADEAKAASMVGGGFH

SEQ ID NO: 359 - protein, 510 aa, Pisum sativum
MEVKSPTKNNNNNDKGSSFEVDGVQPTPSPIRKMIAVASIATGVQFGWALQLSLLTPYSQTLGVPHVWSSFIWLCGPISGLLVQPIVGYYSDRSTSRFGRRRPFILSGALAVAVSVFLIGYAADLGHSMGDDLSKKTRPRAVAIFVVGFWILDVANNMLQGPCRAFLADLAAGDEKKTRTAMSFFSFFMAVGSILGYAAGSFGKLHKIFPFTETVACNVFCQNLKTCFFFSILLLIFLASFALIYVKETPKTKLELKDDDDKQVSCFGELFHALKELKRPMWILMLVTAVNWIAWFPFFLFDTDWMGREVYGGAPGEKAYDTGVRVGSLGLMLNSVVLGLMSLAVEPLGRMVGGIKRLWGIVNFILAICLAMTVLITKVAEHDRHMTGGATVGHPSEGVKAGAMIFFAVLGIPLAITFSVPFALASIYSSASGAGQGLSLGVLNLAIVIPQMLVSALNGPWDALFGGGNLPAFVVGAVAAAVSAVLAIVLLPSVKPDDEAKVKLAAGGFH

SEQ ID NO: 360 - protein, 571 aa, Zygosaccharomyces rouxii
MSKSEEHNETAITPEFSPELSPTESPSPSGGLPAKLEDEALKDYVLHPEDEEPIIDLPKKPASAYISVAIMCVMIAFGGFVFGWDTGTISGFVNQSDWIRRFGTQRSDGTYYLSKVRMGLVVSIFNVGCAIGGLTLSKIGDIYGRKIGLISVVVVYVVGIVIQIASVDKWYQYFIGRIISGLGVGGTAVLSPMLISEVSPKHIRGSLVSCYQLMITAGIFLGYCTNYGTKNYTNSVQWRVPLGLCFAWALFMIGGMTFVPESPRFLISVGKIEEAKRSLSKSNKISTEDPGLLAELENIQASVEEEKLAGSASWSEMFSPKTKVLQRMIMGIALQSLQQLTGDNYFFYYGTTIFKSVGLEDSFQTSIIIGVVNFFCTFLSLFTVDRFGRRKCLLWGAIGMVCCFAVFASVGVTRLWPNGQGNGSSKGAGNCMICFTMFYIFCFATTWAPLCYVIVSESYPLRVKSKGMALATAANWLWGFLISFFTPFITDAINFYYGYVFMGCLVFAYFYVFFFVPETKGLTLEEINEMWMDNVLPWKSPDWVPSSRRNVDYDANAMSHDDKPFYKKLLG

SEQ ID NO: 361 - protein, 362 aa, Jeotgalibacillus marinus
MLPKYAQVKEEISSWINQGKILPDQKIPTENELMQQFGVSRHTIRKAIGDLVSQGLLYSVQGGGTFVASRSAKSALHSNKTIGVLTTYISDYIFPSIIRGIESYLSEQGYSMLLTSTNNNPDNERRGLENLLSQHIDGLIVEPTKSALQTPNIGYYLNLEKNGIPFAMINASYAELAAPSFTLDDVKGGMMAAEYLLSIGHTHMMGIFKADDTQGVKRMNGFIQAHRERELFPSPDMIVTFTTEEKESRLLEKVKATLEKNSKHMPTAILCYNDEIALKVIDMLREMDIKVPEDMSIVGYDDSHFAQISEVKLTSVKHPKSVLGKAAAKYVIDCLEHKKPKQEDVIFEPELIIRQSARKLNE

SEQ ID NO: 362 - protein, 547 aa, Clavispora lusitaniae
MSQEDINTTGTTPVNGSILEKEKNNEEQLVDVLPNKSFKDYISISVFCLFVAFGGFVFGFDTGTISGFVNMPDFKRRFGQKRKDGSHYLSNVRTGLVVSIFNVGCAVGGIILSKIADMQGRRMALMVSMVIYVVGIIIQIASQHAWYQYFIGRLISGLAVGMVSVVSPLFISEVSPKQIRGTLVCCFQLFITMGIFLGYCTTYGTKKYSDSRQWRVPLGLCFAWAIFLVVGMLSMPESPRYLMEKKKIDEAKKSIARSNKISEEDPFVHTEIQLIQAGIDREALAGKASWKELITGKPKIFRRVIMGIMLQSLQQLTGDNYFFYYGTTIFQAVGMNDSFETSIVLGIVNFASTFAGIYAIEKLGRRMCLLTGSACMFVCFIIYSLLGSQHLYKHGTSNVSSNTRKPTGDAMIFITCLYIFFFASTWAGGVYCIISESYPLRIRSKAMSVAQAANWMWGFLISFFTPFITSAIHFYYGFVFTGCLLFSFFYVYFFVYETKGLSLEEVDELYASDTLPWKSAGWVPPSLEHMAHATRYAGEEKPEDEQV

SEQ ID NO: 363 - protein, 547 aa, Clavispora lusitaniae
MSQEDLMTGSTPRNEESLLEKEQDLRENLQKQMPEKTFKDYLSISFFCLLVAFGGFVFGFDTGTISGFVNMPDFKRRFGQHKANGEHYLSNVRTGLIVSIFNIGCAVGGIFLSKIADVWGRRMGMMVAMVIYVVGIIIQIASQSAWYQYFIGRLISGLAVGTISVVSPLFISEVSPKQIRGTLVCCFQLFITMGIFLGYCTTYGTKKYSDSRQWRIPLGLCFAWAIFLVTGMLSMPESPRYLIEKSKIDEARHSIAISNKLSEEDPAVYTEVQLIQAGIDREAMAGKASWKELITGKPKIFRRVIMGIVLQSMQQLTGNNYFFYYGTTIFQAVGMKDSFQTSIVLGIVNFASTFVGIYAIEKMGRRACLLTGSIAMSALFIIYSLLGTQSLYKHGTSNDTSNTRKPTGNAMIFITCLIIFFFASTWAGGVYCIVSESYPLRIRSKAMSVATAANWMWGFLISFFTPFITSAIHFYFGFVFCGCLIFSIFYVYFFVYETKGLSLEEVDELYASDTVPWKSSGWTPPSVEHMTQSAGYADQGKPTEERV

SEQ ID NO: 364 - protein, 492 aa, Penicillium rubens; identical to SEQ ID NO: 322

SEQ ID NO: 365 - protein, 546 aa, Saccharomyces cerevisiae
MASSSVSILGTSAKASTSLSRKDETKLTPEAREASLDIPYKPIIAYWTVMGLCLMIAFGGFIFGWDTGTISGFINQTDFKRRFGELQRDGSFQLSDVRTGLIVGIFNIGCALGGLTLGRLGDIYGRKIGLMCVILVYVVGIVIQIASSDKWYQYFIGRIVSGMGVGGVAVLSPTLISEISPKHLRGTCVSFYQLMITLGIFLGYCTNYGTKKYPNSIQWRVPLGLCFAWAIFMLIGMVMVPESPRYLVEKGKYEEARRSLAKSNKVTVTDPGVVFEFDTIVANMELERAVGNASWHELFSNKGAILPRVIMGIVIQSLQQLTGCNYFFYYGTTIFNAIGMQDSFETSIVLGAVNFASTFVALYIVDKFGRRKCLLWGSASMAICFVIFATVGVTRLWPQGKDQPSSQSAGNVMIVFTCFFIFSFAITWAPIAYVIVAETYPLRVKNRAMAIAVGANWMWGFLIGFFTPFITRSIGFSYGYVFMGCLIFSYFYVFFFVCETKGLTLEEVNEMYEERIKPWKSGGWIPSSRRTPQPTSSTPLVIVDSK

SEQ ID NO: 366 - protein, 468 aa, Bacillus sonorensis
MVNEKKISSGFIYFFGAFAGILFGYDIGVMTGALPFLQHDWNLQDNAGVIGWITSSVMLGAIFGGALAGQLSDRLGRRKMILISALIFVVGSILSGIAPHNGILFLIVSRVLLGLAVGAASALVPAYMSEMAPARLRGRLSGINQTMIVSGMLLSYIVDFLLKDLPETMAWRLMLGLAAVPALILYVGMLKLPESPRFLIKNNKLDEARKVLSYIRSNKEEIDSEITQIQETAREETKANQKASWATLLSNKYRFLLIAGVGVAAFQQFQGANAIFYYIPLIVEKATGNAASSALMWPIIQGVILVLGSLIFLMIADKFNRRTLLTVGGTIMGLSFILPAILNILIPNANPMMMVVFLSIYVALYSFTWAPLTWVIVGEIFPLAIRGRASGLASSFNWIGSFLVGLLFPIMTASMSQEAVFAIFGVICLLGVVFIRTRVPETRGRSLEEIEKNGENRQVNAKSAQINL

SEQ ID NO: 367 - protein, 498 aa, Brassica napus
MVMGVMNIEEGASLPAKNTFQVFMCSIIAAVGGLMFGYDIGISGGVTSMDTFLIKFFHHVYEKKHRVHENNYCKFDDQLLQLFTSSLYLAGIFASLAASYLSRRFGRKPIIMSASAFFLCGAILNFFAQELGMLIGGRILLGCGIGFGNQTVPLFISEIAPARIRGGLNLMFQFLITIGILAASYVNFLTSTVKDGWRYSLGGAAVPALILLIGSFFIHETPASLIERGKDEEGKRVLRKIRGLEDIELEFNEIKRATEISNKVKSPFKELFTKSENRPPLVCGTLLQFFQQFTGINVVMFYAPVLFQTMGSGNNASLISTVVTNGVNAVATIIAVVMVDRLGRRFFLVEGATQMTATQISIGALLLKHLHLIGPITSRSVPLIVLILICIYVSGFAWSWGPLGWLVPSEIYPLEVRNAGYFCAVAMNMVCTFVIGQFFLSALCRFRSGLFFFFAVMNVIMGLFVIFFLPETKGVPIEDMAEQRWKKHWHWRKYFKQN

SEQ ID NO: 368 - protein, 498 aa, Eutrema salsugineum
MAVGVMNIEEGVSFPAKTTSHVRLSSLIAAVGGLMFGYDIGISGGVTSMDTFLKKFFPHVYEKKHRVHENNYCKFDDQLLQLFTSSLYLAGIFASLAASFLSRRYGRKPIIVSASIFFCLGALLNLFAQDLGMLIAGRLLLGLGIGFGNQTVPLFISEIAPPQTRGALNIMFQFLITIGILAASFVNFLTSTMKDGWRYSLGGAAIPALILLIGSYFIYETPASLIERGRDEEGKQVLRTIRGVEDIELEFNEIKRATEFSNNVKSPFKELFLNRENRPPLVCGTLLQFFQQFTGINVVMFYAPVLFQTMGSGNDASLISTVVTNGVNAIATIIAVFLVDKFGRKFFLVEGASQMTGTQVAIGALLFKNLHLVGPITSHVVPLIVLILICIYVSGFAWSWGPLGWLVPSEIYPIEVRNAGYFCAVAMNMVCTFIIGQFFLSALCRFRSMLFFFFGVMNVIMGLFVIFFLPETKGIPIEEMADKRWKKHWHWKNYFKQN

SEQ ID NO: 369 - protein, 546 aa, Clavispora lusitaniae
MSQEDVTSGSTPINGSLLETEKKLEENLEHQMPEKSFKDYISISIFCLLVAFGGFVFGFDTGTISGFVNMPDFKKRFGQHKADGEHYLSNVRTGLIVSIFNVGCAVGGIFLSKIADVWGRRMGMMVAMVIYVVGIIVQIASQHAWYQYFIGRLISGLAVGTISVVSPLFISEVSPKQIRGTLVCCFQLFITMGIFLGYCTTYGTKKYTDSKQWRVPLGLCFAWAIFLVVGMLSMPESPRYLIEKAKIDEARRSIARSNKLSEEDPAVHTEIQLIQAGIDREALAGKASWKELITGKPKIFRRVLMGVILQSLQQLTGNNYFFYYGTTIFKAVGMTDSFQTSIVLGIVNFASTFVGIYAIERMGRRMCLLVGSATMSVCFIIYSTLGSQNLYIHGTENDPSNTRKPTGNAMIFITCLFIFFFASTWAGGVYCIVSESYPLRIRSKAMSVATAANWMWGFLISFFTPFITSAINFYYGYVFTGCLIFSFFYVYFFVVETKGLSLEEVDELYASGTLPWKSAGWVPPSLEHMAHSTGYAAQDKPSDEQV

SEQ ID NO: 370 - protein, 499 aa, Yarrowia galli
FVIVMDGYDGFLIPSFYAVPAFQKNFGVQLPDGSWTIQAKWQTAYMVGAPIGRIVGALGVGFLADKFGRKWLTIIGLCVLSGITFLVFFAVNKTMLIIGWFLSGLIWGLFNTLAPTYVSEICPVCLRSTFAAAINLSWVVGQFISTAVITSSEWRTDEWAYRIPLGVQWVFPVVLIPLVILMPESPWWLLKQSREKDARKVLEQLMDPQEVDIDLYLDYMCRTLIEEAEIGGFRDCFKGSDLRRTEICCLVYFFQPLSGLYLLSYTAYFLELTGIPQNIVFKLTLGVTGLAVLSSLLSPFIILQFPRRSIYLGALLIMSGILFGIGISACYTTQAAKWTAAVLIYVWVGTYDATIGPLTYVIVSESSSVKLRSKTIALASITNSIMILVLHIAVPYMMNEEEANMGGYVGFVYAPFCLVAVAWAYWRLPELKGMSFMEIDKFFQEARGRRSRADNNRLTSCVSQQSFHKSSDALDRLKQPGHQTTSLESLGVGQLREVR

SEQ ID NO: 371 - protein, 554 aa, Debaryomyces hansenii
MSQEEYSSGVQTPVSNHSGLEKEEQHKLDGLDEDEIVDQLPSLPEKSAKDYLLISFFCVLVAFGGFVFGFDTGTISGFVNMSDYLERFGELNADGEYFLSNVRTGLIVAIFNVGCAVGGIFLSKIADVYGRRIGLMFSMIIYVIGIIVQISASDKWYQIVVGRAIAGLAVGTVSVLSPLFIGESAPKTLRGTLVCCFQLCITLGIFLGYCTTYGTKTYTDSRQWRIPLGLCFVWAIMLVIGMVCMPESPRYLVVKNKIEEAKKSIGRSNKVSPEDPAVYTEVQLIQAGIERESLAGSASWTELVTGKPRIFRRVIMGIMLQSLQQLTGDNYFFYYGTTIFQAVGMTDSFQTSIVLGVVNFASTFLGIYTIERFGRRLCLLTGSVCMFVCFIIYSILGVTNLYIDGYDGPTSVPTGDAMIFITTLYIFFFASTWAGGVYCIVSETYPLRIRSKAMSVATAANWIWGFLISFFTPFITSAIHFYYGFVFTGCLLFSFFYVYFFVVETKGLTLEEVDELYAQGVAPWKSSKWVPPTKEEMAHSSGYAAEAKPHDQQV

SEQ ID NO: 372 - protein, 552 aa, Meyerozyma guilliermondii
MGQFIEKFRDWTLPQHLLVENYLHGKKLTHSVVALSALAIFFFGYDQGMMSGVNNSPDYVKIMKFGYWDEDANVTVTDSTKQGGIVSIYYFGTLCGCLFGGWYSDMFGRIKSIALGALIAIVGAALQGSAKSVAWMCGARFLNGIGTGILNAVVPVYSSETAEATSRGAYICLEFTLNILGVVIAYWLEFGLSYLGLMNSFRWRFPIFFQIIPLFFLFLLCWSFPESPRYLVKIGHHDRALALLKKMRGEERGAEEFNEIVATFEYEKDSALSTNYVRIFFDWYKGTPEAVAKAKKLHVGRRVQMVIWFQILQEWCGIAGITVYQTDIFQQAGYSAKKSQWIAGINNIFYCLSTLVAVFTIDRWGRRFVTFWGCTGMGIAMFLAGGLSKAQQLHLDNKAWGAASTAFVFIYTSIFGSTLLMTPWIIPSEMFPLKLRAAGNAAGVVGWSIGNGWLMLLCPVMFNAIHEKTLYIFGASNFFTLLVVYLLYPETANRTLEEIDFLFASKNPLVPACEAEFRRLKEEHRLASLGDSAEVLNEEKPTDELKDSVSSV

SEQ ID NO: 373 - protein, 552 aa, Ambrosiozyma monospora; identical to SEQ ID NO: 372

SEQ ID NO: 374 - protein, 571 aa, Zygosaccharomyces rouxii
MKIDKKQIGCALMGKRINYRVTIYDKFPKIYNIFVIGFTSCISGLMFGFDVSSMSSMIGTDGYKEYFGTPGPTEQGGITACMPAGSFVASLIAPYFSDNFGRRVSLHLCAIFWMIGAVLQCASQDLAMLCVGRVVSGLGIGFGSSVAPVYCSEIAPPKIRGAIGGLFQFSVTLGIMILFFIGYGAHFINGAGSFRLTWGIELVPGACLLIAVFFLPESPRWLALHDYWEEAEDIVIRVAAKGNRENEQVMIQLEEIREQVEIDKEAEAFQLKDLFRPKTRVKTMVGMMAQMWQQMCGMNVMMYYIVYIFTMAGFKGGAVLVSGSIQYVLNVVMTIPALFLMDKCGRRPVLLIGGLLMCAWLFAVGGLLATYSDPYPHGFEGDETVRIAIPQSNKPAANGVIACSYLFVCSYAPTWGVCIWIYCAEIFNNTERAKGSGLCTAVNWIFNFALALFVPSAFKNLTWKTYIMFGVFCVALTINTFLLFPETKGKTLEEIDQMWEAHIPAWKTHSWVPTIPSASKFDQEMHKTDLEHVEDTGDSDRISPKDDSEKGSVTGLEEVAKSNPNSTSLSE

SEQ ID NO: 375 - protein, 454 aa, Yarrowia alimentaria
MVPSFYALPMFQRKYGIQLPNGDWTIEAKWQTAFLVGTPIGRITGALGVGMLSDRFGRKMVTIAALVLMSGVTFIVFFATGKEMLCAGWIISGVIWGVFNTMAPTYASEMCPIKLRAFLSAAINLSWVIGQLVSTGVVTGTSTREDIWAYRIPLAVQWAFPAILVPALLFAPESPWWLLQKGRIEDARKTLTRLVDPKKVDVDLYLDYIVQTDREEVVSGSFKDCFKGSDLRRTEIGAMAFSIQVLCGANIINFFAYFFQLTGVPQDMIFKLTVGLSGLAFVSTALSSIPIARYGRRAIFLTGLTVMATVLFIMGILGCIDTKGSSWGTAILLYIWTGTYDMTVGPVAFVIVSETSSMRLRSKTVAISAITVSVFALVFNIAVPYMLNEAEADIKGKVGFVFGPLCIISLIWTYFRLPELKGLSYMEIDRLFESGIKARDFKEARSKDTYIEEY

SEQ ID NO: 376 - protein, 550 aa, Yarrowia lipolytica
FVIVMDGYDGFLIPSFYAVPSFQRRYGVQLPDGSWTVEAKWQTAYMVGAPIGRIAGALGVGVLADRFGRKRVTLVGLFCLSGITFIVFFAVGKAMLVVGWFLSGLIWGIFNTMTPTYVSEICPVSLRSTFAAAINLSWVVGQFISTAVITASESRQDEWAYRVPLAVQWVFPVVLIPLVMVMPESPWWILKHGDKKGARQVLTRLMDEKDVDIDMYLEYMRQTLEDEVDGGSFVDCFKGSDVRRTEICCLTYFFQPLSGLYILSYAAYFLQLTGIPQNVVFKLTLGLTGLAVMASLVAPIVILTFTRRSIYMGSLALMAATLFAIGITACYDTQAAKWAAPVLIYVWVGTYDATIGPLTYVIVSETSSVKLRSKTIALASITNSIMVLVLHISVPYMMNEEEANMDGFVGFIYAPFCLLAIAWAWWRLPELKGMSFMEIDMLFGNETGTQRAPLVFDGQKRERQPLESLDGLGWRFGGQQDLSETNDNNEGSREERLSNPYCSSNEDNRSDRFQPSERGCILDSPKRKHAIEKNGVVITETLEMGENADR

SEQ ID NO: 377 - protein, 497 aa, Capsella rubella
MAVGSIKIEEGNAFPAKMTVQVALCSLIAAVGGLMFGYDIGISGGVTSMDTFLLDFFPHVYAKKHRVHENNYCKFDDQILQLFTSSLYLAGIFASFVASYFSRAYGRKPTIIFASVFFLLGAILNLSAQDLGMLIGGRIFLGCGIGFGNQTIPLFISEIAPAKYRGGLSLLFQFLITIGILAASFVNYLTSTMKNGWRYSLGGAAVPALILLIGSFFIHETPASLIERGKDEKGKQVLRKIRGVEDIELEFSEIKHITEISTKVKSPFKELFTKRENRPPLICGTLLQFFQQFTGINVVMFYAPVLFQTMGSGNNASLISTVVTNGVNAAATVFAILAVDMFGRKSFLMEGALQMTVTQMTIGGLLLAHLKLVGPISGHAVPLIVLILICVYVSGFAWSWGPLGWLVPSEIYPLEVRNAGYFCAVAMNMICTFVIGQFFLSALCRFRSGLFFFFGTMNIIMGLFVLVFLPETRGIPIDEMAERRWKTHPRWKKYFKD

SEQ ID NO: 378 - protein, 498 aa, Arabis alpine
MGDNDKKIEEGGSFPAKMTYQVIICCIIAAVGGLMFGYDIGISGGVTSMDTFLLEFFPHVYEKKHRVHENNYCKFDDQLLQLFTSSLYLAGIFASLAASYFSRRFGRKPTIMLASIFFLIGAILNLSARDLGMLIGGRILLGCGIGFGNQTVPLFISEIAPARYRGGLNIMFQFLITIGILTASYVNYLTSTMKNGWRYSLGGAAVPALILLIGSIFIHETPANLIERGKDDKGKEVLRKIRGVEDIELEFQEIKRATEISQKVKSPFKELFCNRENRPPLICGTLLQFFQQFTGINVVMFYAPVLFQTMGSGNDASLISTVVTNGVNAIATIFAIVFVDMFGRKFFLVEGATQMTVTQIAIGSLLGVNLKLVGPITGHTVPLTVLILICVYVSGFAWSWGPLGWLVPSEIYPLEVRSSGYYCAVAMNMICTFIIGQFFLSALCRFRFILFFFFGVMNIIMGLFAIFFLPETKGVPIEEMAERRWKKHWHWKKYFKQN

SEQ ID NO: 379 - protein, 518 aa, Ambrosiozyma monospora; identical to SEQ ID NO: 301

SEQ ID NO: 380 - protein, 492 aa, Penicillium digitatum
LFGFDVSSMSAWIGVDTYTDYFGSPDANLQGGITASMSAGSFAGSIAAGWLSDILGRRYALMIASLVWIVGAMVQCSAQNVTHLVAGRVVSGLAVGVTSSQTCVYLSELAPARIRGRVVGIQQWAIEWGILIMYLIAYGCVVGVSGTAAFRICWGVQAVPGLILFIALFFFPESPRWLASKERWEEALDTLAIIHANGDRHDPVVQAAFEEVQEAVRVAHESQDVSFLALFGPRVWKRTMCGMTVQMWQQLLGGNVAMYYVVYIFEMAGMTGNTTLWSSAIQYVIFLVTTGGMLPFIDRIGRRKLLLIGSVTCMVLHFIIAGVMASKGHAVPNVNGNANLTWEIKGSAGMTVIAFSYIFTGIYGLTWAPTGWVYAAEVFPLKYRAKGVGLSAATNWIFNFALAYFIAPAFHNIQWRTYIIFGVFCTAMTFHVFFMYPETVGRSLEEIDLVFETDVKPWRSHDIADLFGEEIERRKEFGAKMETSGATHKEVL

SEQ ID NO: 381 - protein, 466 aa, Unknown
  low complexity metagenome
MADEKKIPSAFIYFFGAFGGILFGYDIGVMTGALPFLEHDWNLQNSAGVIGWITSAVMFGAIFGGALAGQLSDRLGRRKMILISALVFTVGSILSGIAPNDGQYYLIGVRILLGLAVGAASALVPAYMSEMAPARLRGRLSGINQTMIVSGMLLSYIVDFLLKNLPETIAWRLMLSLAAVPALILFFGVLRLPESPRFLIKNNKIDEARKVLGYLRSKKETIDSEVKQIQETASEEKKANQKASWGTLFSPKYRYLVIAGVGVAAFQQFQGANAIFYYIPLIVQKATGQAASSELMWPIIQGVILVLGSLLFLVIADKFNRRALLTMAGTVMGLSFILPAIINLIVPHANPMMIVVFLCIYVAFYSFTWAPLTWVIVGEIFPLVIRGRASGLASSFNWIGSFLVGLLFPIMTATMSQEAVFAIFGVICLLGVLFIRTRVPETRGHTLEEIEEIGEKDAKLKAGNTF

SEQ ID NO: 382 - protein, 479 aa, Corynebacterium glutamicum
MAGHIIRSDSRPIEGVMMTETVQQTKKIPRPYIYFFGSFGGILFGYDIGVMTGALPFLQSDWNIQHEAAIIGWITSSLMLGAVFGGVLAGQLSDKLGRRKMILFSALVFMIFSLGCAVAPDGGWVFLAIVRVFLGLGVGAASALVPAYMSEMAPAKIRGRLSGLNQTMIVSGMLASYIVAYFLRNLHETTAWRLMLGLAAIPALVLFLGVLRLPESPRFLIKNGRIEEARTVLSYIRDNDAIDSELKNIQETAELENAIQAKTRLATLFSGRYRYLVAAGVGVAAFQQFQGANAIFYYIPLIVEKASGTEASNALMWPIIQGVILVLGSLLFMVIADKFNRRTLLTVGGTVMGLSFLFPTFIHMTIPDANPMMIVVFLSIYVAFYSFTWAPLTWVIVGEIFPLAIRGRASGLASSFNWIGSFSVGLLFPIMTAQMTQDAVFAIFGIICILGVLFVRFLVPETRGRTLEEIEAHGTKARV

SEQ ID NO: 383 - protein, 547 aa, Candida intermedia
MSQDSHSSGAATPVNGSILEKEKEDSPVLQVDAPQKGFKDYIVISIFCFMVAFGGFVFGFDTGTISGFVNMSDFKDRFGQHHADGTPYLSDVRVGLMISIFNVGCAVGGIFLCKVADVWGRRIGLMFSMAVYVVGIIIQISSSTKWYQFFIGRLIAGLAVGTVSVVSPLFISEVSPKQIRGTLVCCFQLCITLGIFLGYCTTYGTKTYTDSRQWRIPLGLCFAWAILLVVGMLNMPESPRYLVEKHRIDEAKRSIARSNKIPEEDPFVYTEVQLIQAGIEREALAGQASWKELITGKPKIFRRVIMGIMLQSLQQLTGDNYFFYYGTTIFQAVGLKDSFQTSIILGIVNFASTFVGIYVIERLGRRLCLLTGSAAMFVCFIIYSLIGTQHLYKQGYSNETSNTYKASGNAMIFITCLYIFFFASTWAGGVYCIISESYPLRIRSKAMSIATAANWLWGFLISFFTPFITSAIHFYYGFVFTGCLAFSFFYVYFFVYETKGLSLEEVDEMYASGVLPLKSANWVPPNLEHMAHSAGYAGADKATDEQV

SEQ ID NO: 384 - protein, 467 aa, Lactobacillus versmoldensis
MNKVKKIPSGFIYFFGSFGGILFGYDIGVMTGALPFLLHDWSLQNSAGVVGWITSAVMFGAIFGGALAGSLSDKLGRRKMILISAIIFAIGSILSGISPHDGQYYLIIVRIFLGLAVGAASALVPAYMSEMAPARLRGRLSGINQTMITSGMLLSYIVDFLLKGLPEQLAWRLMLGLAAVPAIILFCGVLRLPESPRFLVKNNRLDEARQVLSFIRPSDEVETEIKNIQETATDEHVAEKNTSLKTLFSGKYRYLVIAGVGVAAFQQFQGANAIFYYIPLIVEKATGNAASSALMWPIVQGILLVVGSLLFLLIADKFNRRSLLTLGGTVMGLSFILPTILNMMIPNMSPMMIVVFLSIFVAFYSFTWAPLTWVLVGEIFPLAIRGRASGIASSFNWIGSFLVGLLFPIMTANMSQEAVFAIFGIICLLGVLFVRTRVPETKGHTLEEIEEEGTRHESKKAATTQES

SEQ ID NO: 385 - protein, 494 aa, Aspergillus brasiliensis
LFGFDVSSMSAWIGTDQYLEYFHSPDSDLQGGITASMSAGSFAGALAAGFISDRIGRRYSLMLACCIWVIGAAIQCSAQNVAHLVAGRVISGLSVGITSSQVCVYLAELAPARIRGRIVGIQQWAIEWGMLIMYLISYGCGQGLAGAASFRVSWGVQGIPALILLAALPFFPESPRWLASKERWEEALDTLALLHAKGDRNDPVVQVEYEEVQEAARIAQEAKDVSFLSLFGPKLWKRTVCGVSAQVWQQLLGGNVAMYYVVYIFNMAGMSGNTTLYSSAIQYVIFLVTTGSILPFVDRIGRRLLLLTGSVLCMACHFTIAGLMASRGHHVDSVDGNANLKWSITGPPGKGVIACSYIFVAVYGFTWAPVAWIYASEVFPLKYRAKGVGLSAAGNWIFNFALAYFVAPAFTNIQWKTYIIFGVFCTVMTFHVFFFYPETAQRSLEDIDMMFEADMKPWRTHKIPDRFGEEIERHKQKDMVDQEKGVVSTHDEMA

SEQ ID NO: 386 - protein, 543 aa, Lodderomyces elongisporus
MSSKIERAFSGPALSINNFLDKMPKIYNVYFIASISTIAGMMFGFDISSMSAFVGQDAYLNYFNSPGSDMQGFITSAMALGSFFGSLASTFVSEPFGRRLSLLTCSFFWMVGAAIQSSSQNRAQLIIGRIISGVGVGFGSSVATIYGAELAPRKIRGLIGGLFQFSVTLGIMIMFYISYGLGQINGTASFRIAWGIQIVPGLLLFLGCLIIPESPRWLAKQGQWEKAEFIVSKIQAKGDRENPDVLIEITEIKDQLLIEDQAKSVSYATLFKKKYILRTFTAVFAQIWQQLTGMNVMMYYIVYLFMMAGKTGNTNLVASSIQYVLNVVATVPALFLVDKIGRRKLLIGGAVMMMIFQFGLAGILGAHSKPWPDSGNESVTIQIPLSDKRASEGAIACSYLFVCSFAMSWGVGIWIYCSEVWGNNRISQRGNSLSTSANWILNFAIAMYTPSGFANINWRTYIIYGVFCLAMAIHVFFGFPETKGKRLEEIGQMWDEKVPAWRSSSWQPTIPIASDAEIARKLSVEHKEDGELMEQDTNSEEKI

SEQ ID NO: 387 - protein, 495 aa, Aspergillus clavatus
LFGFDVSSMSAWIGTTQYLDYFNFPDSNLQGGITASMSAGSFVGAIAAGFLSDQIGRRLSLMVASIIWIIGAVIQCSAQNVTHLVAGRVISGLSVGITSSQVCVYLAELAPARIRGRIVGIQQWAIEWGILIMYLISYGCSEGVKSPAAFRIAWGVQAVPALVLAVALLFFPESPRWLASKERWEESLDTLALLHGNGNRDHPEVQAEWEEVQEAVRMAQEAKNVSFFALFGPRVWKRTMCGVSVQVWQQLLGGNVAMYYVVYIFQMANMPGDTVLYSSAIQYVIFLVTTGFILPYIDRIGRRLLLLSGSIICMALHFAIAGIMATYGHPVDEIDGNKNLRWEIDGTAGKGVIACSYIFVGVYGLTWAPTAWIYASEVFPLKYRAKGVGLSAAGNWIFNFALAYFVAPAFTNIKWKTYIIFGVFCTAMTFHVFFMYPETSRRSLEEIDMMFDSNVKAWQSHKVHDKFGEEIEKHRQQSVAEAEKPANTAVHAEVV

SEQ ID NO: 388 - protein, 465 aa, Lactobacillus zymae
MDTKKKIPSGFIYFFGSFGGILFGYDIGVMTGALPFLKHDWALTNASLVGWITSAVMFGAIFGGALAGQMADKLGRRKMILISSLIFAIGSILCGFSPNNGTYYLIIVRMFLGLAVGAASALVPAYMSEMAPARLRGRLSGINQTMIVSGMLLSYVMDFILKDLPEQFAWRLMLGLAAVPAIILFAGVLKLPESPRFLIKTGNRDEARQVLSYIRKPDEIDGEMKQIEDTANVEENAMEKSSWGTLFTGKYRYLVIAGVGVAAFQQFQGANAIFYYIPLIVEKATGSAASSALMWPIIQGVILVLGSLLFLWIADKFNRRTLLTMGGTVMALSFLLPAVINKLMPNASPMMIVVFLSIYVAFYSFTWAPLTWVLVGEIFPLAIRGRASGLASSFNWIGSWAVGLLFPIMTASMSQEAVFAIFGVICVLGVLFIRFCVPETKGHTLEEIEAQGTRGKEKPEEAGQN

SEQ ID NO: 389 - protein, 559 aa, Lachancea fermentati
MSLKNKLLLRDVQYRGAFYDRFPKIYNVYVIGIVSCISGLMFGFDISSMSSMIATDHYKHYFDTPDSITQGGITASMAGGSFLGSLVSSSVTDAFGRRVSLHVCATLWIIGAILQCASQDRAMLIVGRVISGLGIGFGSSAAPVYCSEVAPPKIRGFICGLFQLSVTVGIMVLFFIGYGCHFIDGTASFRITWGIQMVPGFVLLFATFFLPESPRWLANHDRWEETSEVVSRIGAHGNLDDPEVKLQLEEIREQVIIDQVALNFGYKDLFRKKTLPKTIVGLSAQMWQQLCGMNVMMYYIVYIFEMAGSTGNTVLLSGSIQYVLNVVMTIPALFLVDKAGRRPVLIAGGIFMFIWLFVVAGLLATYSVPQPNGFDGDDTVRISIPDSDKPAARGVIAASYLFVCSFAPTWGVGIWIYCSEIFNNMERAKGSALSAAVNWAFNFALAMFVPSAFRNINWKTYIIFGVFSVALTIQTFFMFPETRGKTLEEIDQMWADNIPAWRTGSYVPMLPVVEDDEGNKLGLIARSQHLETVEGNEKQLMTHDTNRDSSTENASSHSS

SEQ ID NO: 390 - protein, 574 aa, Saccharomyces cerevisiae
MAVEENNMPVVSQQPQAGEDVISSLSKDSHLSAQSQKYSNDELKAGESGPEGSQSVPIEIPKKPMSEYVTVSLLCLCVAFGGFMFGWDTGTISGFVVQTDFLRRFGMKHKDGTHYLSNVRTGLIVAIFNIGCAFGGIILSKGGDMYGRKKGLSIVVSVYIVGIIIQIASINKWYQYFIGRIISGLGVGGIAVLCPMLISEIAPKHLRGTLVSCYQLMITAGIFLGYCTNYGTKSYSNSVQWRVPLGLCFAWSLFMIGALTLVPESPRYLCEVNKVEDAKRSIAKSNKVSPEDPAVQAELDLIMAGIEAEKLAGNASWGELFSTKTKVFQRLLMGVFVQMFQQLTGNNYFFYYGTVIFKSVGLDDSFETSIVIGVVNFASTFFSLWTVENLGRRKCLLLGAATMMACMVIYASVGVTRLYPHGKSQPSSKGAGNCMIVFTCFYIFCYATTWAPVAWVITAESFPLRVKSKCMALASASNWVWGFLIAFFTPFITSAINFYYGYVFMGCLVAMFFYVFFFVPETKGLSLEEIQELWEEGVLPWKSEGWIPSSRRGNNYDLEDLQHDDKPWYKAMLE

SEQ ID NO: 391 - protein, 504 aa, Wickerhamomyces ciferrii
MSAIVGTKQYLEYFNHPGSTLQGGITASMSAGSFLGCILSGSVCDILGRKKTIQFSCIFWIIGSVLQCASQNVAMLIVGRVLNGLTVGFTSSQVPVYLSEISKRSVRGKIVGLQQWAIEWGILIMFFIGYGCSYIKGHASFRVPWIIQVVPALFLMFLLIFIPESPRWLASKGRWDECKLILANIHGKGDDEDPEVLTEIAEIQEFVEIENKQAIGYLELYNKKNIYKTLVAQACQCSQQLVGGNVIMYYVVYVFQMAGLTGSINLISSSVQYIIFLLFTVPTLFMMDKVGRRPLMIYGSIAMGTCMFIIAGILAGKGEYAESIGGNDNIHITLVNSPAASRTVLVFSYLFTMFYSLTWAPTAWVYCPEVFDQRTRCRGMAVAAASNWAMNFALAFYVPPAFDNIGWKTFVIFGVFNAASAIYIFFLFPETAKKSLEEIEELFASNSPKPWKTKVGSERFEQTKEEFKQNPIQFDSETQPKSSLENKAEAQHVELAESKTQNSV

SEQ ID NO: 392 - protein, 521 aa, Candida arabinofermentans; identical to SEQ ID NO: 332

SEQ ID NO: 393 - protein, 362 aa, Bacillus licheniformis
MLPKYAQVKEEISSWINQGKILPDQKIPTENELMQQFGVSRHTIRKAIGDLVSQGLLYSVQGGGTFVASRSAKSALHSNKTIGVLTTYISDYIFPSIIRGIESYLSEQGYSMLLTSTNNNPDNERRGLENLLSQNIDGLIVEPTKSALQTPNIGYYLNLEKNGIPFAMINASYAELAAPSFTLDDVKGGMMAAEHLLSLGHTHMMGIFKADDTQGVKRMNGFIQAHRERELFPSPDMIVTFTTEEKESKLLEKVKATLEKNSKAMPTAILCYNDEIALKVIDMLREMDIKVPEDMSIVGYDDSHFAQISEVKLTSVKHPKSVLGKAAAKYVIDFLEHKKPKQEDVVFEPELIIRQSARKLHE

SEQ ID NO: 394 - protein, 546 aa, Candida intermedia
MPDSVTTSTSPSSAPKPALFDEKDIEDSLPTLPKKQAKDYLLISILCFFVAFGGYVFGFDTGTISGFVNMDDFKRRFGQVNSSGEHYLSNVRTGLIVSIFNVGCAVGGIFLSKTGDVWGRRMGIMISMVIYIVGIIIQISSSTKWYQYFIGRLITGLGVGTVSVISPLFIGESSPKHLRGTLVCCYQLCITMGIFLGYCTTFGTKNYSDSRQWRIPLGLCFAWALLLIFGMLNMPESPRFLIEKSRLDDAKHSIARSNKVSPEDPAVYTEIQLIQAGIDREALAGNAGWKELITGKPKIFQRVIIGIVLQSIQQLTGNNYFFYYGTTIFKAVGMSDSFQTSIVLGIVNFASTFVGIYAIERMGRRLCLLVGSACMSVCFLIYSILGSVNLYIDGYANTTENTRKPTGNAMIFITCLFIFFFASTWAGGVYTIVSETYPLRIRSKGMAVATSANWMWGFLISFFTPFITSAIHFYYGFVFTGCLIFSFFFVYFCLRETKGLSLEEVDELYASDVVPWKTSDWTPPSVNNMAQTTGFAAQAKPNVEQV

SEQ ID NO: 395 - protein, 556 aa, Kluyveromyces dobzhanskii
MPLKNWLLVSDIPYEGTFYKKFPHIYNIYCIGMIACISGLMFGFDISSMSSMIGTDAYKDYFNRPDSLTQGGITASMAGGSFLGSVISPNFTDTFGRKVSLHICATLWIIGCILQSAAQNQGMLIAGRVIAGMGIGFGSSAAPVYCSEIAPPKIRGTISGLFQFSVTVGIMVLFYVGYGCHFIESTAAFRITWGLQMVPGLILLVGVFFIPESPRWLANRDRWEEASKIVANVVANGDVENEQVRFQLDEIKEQVMIDAAAKNFSYKDLFRKKTLPKTIVGVSAQMWQQLCGMNVMMYYIVYIFNMAGYTGNTNLVASSIQYVLNVIMTIPALFLIDKVGRRPVLLVGGIFMAIWLFSVAGILATYSEPAPGGVGGDDTVTIQIPSDKSSAAKGVIASSYLFVCSFAPTWGIGIWIYCSEIFNNMERAKGSAVSAATNWAFNFALAMFVPSAFKNISWKTYIVFGVFSVALTIQTFFMFPETRGKTLEEIDQMWTDNIPAWKTGSYIPQLPIMEDEEGNKLGLLGRPQHLEEARSNEKGLIDHSDSNTNSNRSITK

SEQ ID NO: 396 - protein, 574 aa, Saccharomyces cerevisiae
MAVEENNMPVVSQQPQAGEDVISSLSKDSHLSAQSQKYSNDELKAGESGPEGSQSVPIEIPKKPMSEYVTVSLLCLCVALGGFMFGWDTGTISGFVAQTDFLRRFGMKHKDGTHYLSNVRTGLIVAIFNIGCAFGGIILSKGGDMYGRKKGLFIVVIVYIIGIIIQIASINKWYQYFIGRIISGLGVGGIAVLCPMLISEIAPKHLRGTLVSCYQLMITAGIFLGYCTNYGTKSYSNSVQWRVPLGLCFAWSLFMIGALTLVPESPRYLCEVNKVEDAKRSIAKSNKVSPEDPAVQAELDLIMAGIEAEKLAGNASWGELFSTKTKVFQRLLMGVFVQMFQQLTGNNYFFYYGTVIFKSVGLDDSFETSIVIGVVNFASTFFSLWTVENLGRRKCLLLGAATMMACMVIYASVGVTRLYPHGKSQPSSKGAGNCMIVFTCFYIFCYATTWAPVAWVITAESFPLRVKSKCMALASASNWVWGFLIAFFTPFITSAINFYYGYVFMGCLVAMFFYVFFFVPETKGLSLEEIQELWEEGVLTWKSEGWIPSSRRGNNYDLEDLQHDDKPWYKAMLE

SEQ ID NO: 397 - protein, 546 aa, Saccharomyces cerevisiae
  misc_feature (487)..(487): Xaa can be any naturally occurring amino acid
  misc_feature (490)..(490): Xaa can be any naturally occurring amino acid
  misc_feature (498)..(498): Xaa can be any naturally occurring amino acid
  misc_feature (505)..(505): Xaa can be any naturally occurring amino acid
  misc_feature (512)..(513): Xaa can be any naturally occurring amino acid
  misc_feature (515)..(516): Xaa can be any naturally occurring amino acid
MASSSVSILGTSAKASTSLSRKDEIKLTLEAREASLDIPYKPIIAYWTVMGLCLMIAFGGFIFGWDTGTISGFINQTDFKRRFGELQRDGSFQLSDVRTGLIVGIFNIGCALGGLTLGRLRDIYGRKIGLMCVILVYVVGIVIQIASSDKWYQYFIGRIVSGMGVGGVAVLSPTLISEISPKHLRGTCVSFYQLMITLGIFLGYCTNYGTKKYPNSIQWRVPLGLCFAWAIFMVIGMVMVPESPRYLVEKGKYEEARRSLAKSNKVTVTDPGVVFEFDTIVANMELERAVGNASWHELFSNKGAILPRVIMGIVIQSLQQLTGCNYFFYYGTTIFNAVGMQDSFETSIVLGAVNFASTFVALYIVDKFGRRKCLLWGSASMAICFVIFATVGVTRLWPQGKDQPSSQSAGNVMIVFTCFFIFSFAITWAPIAYVIVAETYPLRVKNRAMAIAVGANWMWGFLIGFFTPFITRSIGFSYGYVFMGCFXFSXFYVLFFVXETNGLTXEEVNEMXXEXXNPWNSGGWIPSSRRTPQPTSSTPLVIVDSK

SEQ ID NO: 398 - DNA, 20 bp, Artificial Sequence
  ARTIFICIAL DNA PRIMER
ttcttaccaatcctttcata

SEQ ID NO: 399 - DNA, 28 bp, Artificial Sequence
  ARTIFICIAL DNA PRIMER
tttgttctagcttaattatagttcgttg

SEQ ID NO: 400 - DNA, 24 bp, Artificial Sequence
  ARTIFICIAL DNA PRIMER
taaacagaagacgggagacactag

SEQ ID NO: 401 - DNA, 20 bp, Artificial Sequence
  ARTIFICIAL DNA PRIMER
agggctaaagtctcatgaaa

SEQ ID NO: 402 - protein, 250 aa, Saccharomyces cerevisiae
MPLTTKPLSLKINAALFDVDGTIIISQPAIAAFWRDFGKDKPYFDAEHVIHISHGWRTYDAIAKFAPDFADEEYVNKLEGEIPEKYGEHSIEVPGAVKLCNALNALPKEKWAVATSGTRDMAKKWFDILKIKRPEYFITANDVKQGKPHPEPYLKGRNGLGFPINEQDPSKSKVVVFEDAPAGIAAGKAAGCKIVGIATTFDLDFLKEKGCDIIVKNHESIRVGEYNAETDEVELIFDDYLYAKDDLLKW

SEQ ID NO: 403 - protein, 250 aa, Saccharomyces cerevisiae
MGLTTKPLSLKVNAALFDVDGTIIISQPAIAAFWRDFGKDKPYFDAEHVIQVSHGWRTFDAIAKFAPDFANEEYVNKLEAEIPVKYGEKSIEVPGAVKLCNALNALPKEKWAVATSGTRDMAQKWFEHLGIRRPKYFITANDVKQGKPHPEPYLKGRNGLGYPINEQDPSKSKVVVFEDAPAGIAAGKAAGCKIIGIATTFDLDFLKEKGCDIIVKNHESIRVGGYNAETDEVEFIFDDYLYAKDDLLKW

SEQ ID NO: 404 - protein, 391 aa, Saccharomyces cerevisiae
MSAAADRLNLTSGHLNAGRKRSSSSVSLKAAEKPFKVTVIGSGNWGTTIAKVVAENCKGYPEVFAPIVQMWVFEEEINGEKLTEIINTRHQNVKYLPGITLPDNLVANPDLIDSVKDVDIIVFNIPHQFLPRICSQLKGHVDSHVRAISCLKGFEVGAKGVQLLSSYITEELGIQCGALSGANIATEVAQEHWSETTVAYHIPKDFRGEGKDVDHKVLKALFHRPYFHVSVIEDVAGISICGALKNVVALGCGFVEGLGWGNNASAAIQRVGLGEIIRFGQMFFPESREETYYQESAGVADLITTCAGGRNVKVARLMATSGKDAWECEKELLNGQSAQGLITCKEVHEWLETCGSVEDFPLFEAVYQIVYNNYPMKNLPDMIEELDLHED

SEQ ID NO: 405 - protein, 440 aa, Saccharomyces cerevisiae
MLAVRRLTRYTFLKRTHPVLYTRRAYKILPSRSTFLRRSLLQTQLHSKMTAHTNIKQHKHCHEDHPIRRSDSAVSIVHLKRAPFKVTVIGSGNWGTTIAKVIAENTELHSHIFEPEVRMWVFDEKIGDENLTDIINTRHQNVKYLPNIDLPHNLVADPDLLHSIKGADILVFNIPHQFLPNIVKQLQGHVAPHVRAISCLKGFELGSKGVQLLSSYVTDELGIQCGALSGANLAPEVAKEHWSETTVAYQLPKDYQGDGKDVDHKILKLLFHRPYFHVNVIDDVAGISIAGALKNVVALACGFVEGMGWGNNASAAIQRLGLGEIIKFGRMFFPESKVETYYQESAGVADLITTCSGGRNVKVATYMAKTGKSALEAEKELLNGQSAQGIITCREVHEWLQTCELTQEFPLFEAVYQIVYNNVRMEDLPEMIEELDIDDE

SEQ ID NO: 406 - DNA, 700 bp, Saccharomyces cerevisiae
cacatagactgcgtcataaaaatacactacggaaaaaccataaagagcaaagcgatacctacttggaaggaaaaggagcacgcttgtaagggggatgggggctaagaagtcattcactttcttttcccttcgcggtccggacccgggacccctcctctccccgcacgatttcttcctttcatatcttccttttattcctatcccgttgaagcaaccgcactatgactaaatggtgctggacatctccatggctgtgacttgtgtgtatctcacagtggtaacggcaccgtggctcggaaacggttccttcgtgacaattctagaacaggggctacagtctcgataatagaataataagcgcatttttgctagcgccgccgcggcgcccgtttcccaatagggaggcgcagtttatcggcggagctctacttcttcctatttgggtaagcccctttctgttttcggccagtggttgctgcaggctgcgccggagaacatagtgataagggatgtaactttcgatgagagaattagcaagcggaaaaaaactatggctagctgggagttgtttttcaatcatataaaagggagaaattgttgctcactatgtgacagtttctgggacgtcttaacttttattgcagaggactatcaaatcatacagatattgtcaaaaaaaaaaaaagactaataataaaaa

SEQ ID NO: 407 - protein, 496 aa, Triticum aestivum
MAGTGVFADVLDGEVYKYYADGEWRASASGKTVAIVNPTTRQTQYRVQACTQEEVNKVMDAAKVAQKSWARTPLWKRAELLHKAAAILKEHKTPIAESLVKEIAKPAKDAVSEVVRSGDLVSYTAEEGVRILGEGKLLVSDSFPGNERNKYCLSSKVPLGVVLAIPPFNYPVNLAVSKIGPALIAGNSLVLKPPTQGAVAALHMVHCFHLAGFPKGLISCVTGKGSEIGDFLTMHPGVNCISFTGGDTGIAISKKAGMVPLQMELGGKDACIVLEDADLDLVAANIVKGGFSYSGQRCTAVKVVLIMEAVADTVVEKVNAKLAKLKVGPPEDDSDITPVVTESSANFIEGLVMDAKEKGATFCQEYRREGNLIWPLLLDHVRPDMRIAWEEPFGPVLPVIRINSVEEGIHHCNASNFGLQGCVFTRDINKAIMISDAMESGTVQINSAPARGPDHFPFQGLKDSGIGSQGITNSINMMTKVKSTVINLPSPSYTMG

SEQ ID NO: 408 - protein, 498 aa, Chlamydomonas reinhardtii
MSAQEFYAPILASTGVYKFYIDGQWKESVSGKSVAISNPSTRQTAYQVQACTQDEVNKMFESAKVAQKAWARTPLYKRAEVLHKVASLMRQYAQPIADCLVKEVAKPSKDSLTEVVRSADLIDYTAEEGVRYLGEGQLLNSDSFPGNARNKLCLVSKVPLGVVLAIPPFNYPVNLAVSKLAPALMAGNAVVLKPPTQGAVAGIHMVQCFHAAGLPAGLLSVATGRGAEIGDFLTTHPDVNCISFTGGDTGISIAKKAGMVPLQMELGGKDVCIVCEDADLDLAAKHIIKGGFSYSGQRCTAVKLVLVAAPVADRLVAAVAAGVAKLSVGRPEDDCDITPVVSESSANFIEGLAMDAKAKGATFVTGEWRREGNLIWPVLLDHVTADMRLAWEEPFGPVLPVMRVSSVEAAVEHCNKSKYGLQGCVFTRDINAAIRISDAMETGTVQVNSAPARGPDHFPFQGFRDSGIGSQGIRNSLAMMIKTKSTVINLDKESYTLG

SEQ ID NO: 409 - protein, 496 aa, Apium graveolens
MAGSGVYADIIEGDVFKYYSDGEWKKSSSGKSVAIINPTTRMTQFKVQACTQEEVNKAMETAKKVQKQWAKTPLWKRAELLHKAAAILKEHKAAIADCLVKEIAKPAKDSVTEVVRSGDLVSYCAEEGVRLLGEGKFLVSDSFPGNERTKYCLTSKIPLGVILAIPPFNYPVNLAVSKIGPALIAGNALVLKPPTQGAVACLHMVHCFHLAGFPKGLISCITGKGSEIGDFLTMHPGVNCISFTGGDTGIAISKKAGMVPLQMELGGKDACIVLEDADLDLVASNVIKGGFSYSGQRCTAIKVILVMQSVADTLVEKVNAKVAKLTVGPPEDNSDITPVVSESSANFIEGLVKDAKEKGATFCQEYKREGNLIWPLLLDNVKPDMRIAWEEPFGPILPVIRINSAEEGIHHCNASNFGLQGCVFTRDINKAMLISDAMESGTIQINSAPARGPDHFPFQGLKDSGIGSQGITNSINMMTKIKTTVINLPSPSYTMG

SEQ ID NO: 410 - protein, 496 aa, Cicer arietinum
MAATGVLAEILDGDVFKYYADGEWQKSSSGKSVSIINPTTRKPQYKVQACSQEEVNKVMDSAKAAQKLWAKTPLWKRAELLHKAAAILKEHKAEIAECLVKEVAKPAKDAVTEVVRSGDLVSYCAEEGVRILGEGKFLVSDSFPGNERTKYCLTSKIPLGVILAIPPFNYPVNLAVSKIAPALIAGNAIVLKPPTQGAVAALHMVHCFHLAGFPKGLISCVTGKGSEIGDFLTMHPAVNCISFTGGDTGIAVSKKAGMIPLQMELGGKDACIVLEDADLDLVAANIIKGGFSYSGQRCTAVKVVLVMESVADALVEKVNAKVAKLSVGPPENDCDITPVVSESSANFIEGLVLDAKQKGATFCQEYKREGNLIWPLLLDNVKPDMRIAWEEPFGPVLPVIRINSVEEGIHHCNASNFGLQGCVFTKDVNKAILISDAMETGTVQINSAPARGPDHFPFQGIKDSGIGSQGITNSINMMTKTKTTVINLPSPSYTMG

SEQ ID NO: 411 - protein, 479 aa, Bacillus pseudomycoides
MTTSNTYKFYLDGEWRESSSGQTIDIPSPYLHEVIGKVQAITREEVDEAIKSAQQAQKEWAEASLQDRAKYLYKWADELVNMQDEIADIVMKEVGKGYKDAKKEVVRTADLIRYTVDEALHMHGESMMGDSFPGGSKSKLAIIQRAPRGVVLAIAPFNYPVNLSAAKLAPALIMGNAVIFKPATQGVISGIKMVEALHKAGLPKGLVNVATGRGSVIGDYLVEHPGVNMVSFTGGTHTGAHLAKKAAMIPLVLELGGKDPGIVREDADLGEAAKHIVSGAFSYSGQRCTAIKRVLVHENVADELVSLLKDQVAELTVGSPEQDSTIVPLIDDKSADFVQGLVDDAVEKGATIVIGNKRERNLIYPTLIDNVTEDMKVAWEEPFGPILPIIRVSSDEQAIEIANKSDFGLQASVFTKDINKAFAIANKIDTGSVQINGRTERGPDHFPFIGVKGSGMGAQGIRKSLESMTREKVTVLNLV

SEQ ID NO: 412 - protein, 476 aa, Strepococcus equinus
MTKQYKNYVNGEWKLSKEEIKIYAPATGEELGSVPAMSQEEVDYVYASAKAAQKAWRALSYVERAEYLHKAADILMRDAEKIGAVLSKEIAKGYKSAVGEVIRTAEIINYAAEEGVRLEGEVLEGGSFDPASKKKIAIVRREPVGLVLAISPFNYPINLAGSKIAPALISGNVVALKPPTQGSISGLLLAEAFAEAGLPAGVFNTITGRGSVIGDYIVEHEAVNYINFTGSTPVGEHIGHLAGMRPIMLELGGKDSAIILEDADLDLAAKNIVAGAYGYSGQRCTAVKRVLVMDSIADKLVEKVSALVNNLTVGMPEDNADITPLIDTKAADYVEGLIKDAQEKGAKEVISFKREGNLISPVLFDNVTTDMRLAWEEPFGPVLPFIRVNSVEEAIEISNKSEYGLQASVFTNNFPLAFKIAEQLEVGTVHINNKTQRGTDNFPFLGAKKSGAGVQGVKYSIEAMTTVKSTVFDIAK

SEQ ID NO: 413 - protein, 497 aa, Glycine soja
MAAGTGLFAEILDGDVYKYYADGEWKKSASGKSVAIINPTTRKTQYKVQACSQEEVNKVMDLAKSAQKLWAKTPLWKRAELLHKAAAILKEHKAPIAECLVKEIAKPAKDAVTEVVRSGDLVSYTAEEGVRILGEGKFLVSDSFPGNERTKYCLTSKIPLGVILAIPPFNYPVNLAVSKIAPALIAGNSIVLKPPTQGAVSALHMVHCFHLAGFPKGLINCVTGKGSEIGDFLTMHPGVNCISFTGGDTGIAISKKAGMIPLQMELGGKDACIVLEDADLDLVAANIIKGGFSYSGQRCTAVKVVLVMESAADALVEKVKAKVAKLTVGPPEDDCDITPVVSESSANFIEGLVLDAKEKGATFCQEYKREGNLIWPLLLDNVRPDMRIAWEEPFGPVLPVIRINSVEEGIHHCNASNFGLQGCVFTKDVNKAIMISDAMETGTVQINSAPARGPDHFPFQGIKDSGIGSQGITNSINMMTKVKTTVINLPSPSYTMG

SEQ ID NO: 414 - protein, 475 aa, Strepococcus sp. DD12
MTKDYKNYVNGEWKGSESKIEIFEPANGELLGTVPAMSQADVDEVMAAAKAALPAWRALSYTERAAYLHKAADILERDAEKIGAVLSKEIAKGYKSAVGEVVRTAEIIHFAAEEGLRMEGEVLEGGAFDAGSKKKIAIVRREPVGLVLAISPFNYPVNLAGSKIAPALIAGDVVAFKPPTQGSISGLLLAEAFVEAGIPAGVLNTITGRGSVIGDYIVEHKAVDFINFTGSTPVGENIGRLAGMRPIMLELGGKDAAIVLEDADLDLTAKNIVAGAFDYSGQRCTAIKRVLVMDSVADELVEKVTALVANITVGMPEDSASVTPLIDTKAADFVQGLIDDAAEKGATAKTELKREGNLIYPTVFDHVTTDMRLAWEEPFGPVLPFIRVSSVEEAIKISNESEFGLQGAVFTQDYPRAFAIAEQLEVGTVHINNKTQRGTDNFPFLGVKSSGAGTQGVKYSIEAMTRVKSTVFDIK

SEQ ID NO: 415 - protein, 479 aa, Bacillus thuringiensis
MTTSNTYKFYLNGEWRESSSGETIEIPSPYLHEVIGQVQAITRGEVDEAIASAKEAQKSWAEASLQDRAKYLYKWADELVNMQDEIADIIMKEVGKGYKDAKKEVVRTADFIRYTIEEALHMHGESMMGDSFPGGTKSKLAIIQRAPLGVVLAIAPFNYPVNLSAAKLAPALIMGNAVIFKPATQGAISGIKMVEALHKAGLPKGLVNVATGRGSVIGDYLVEHEGINMVSFTGGTNTGKHLAKKASMIPLVLELGGKDPGIVREDADLQDAANHIVSGAFSYSGQRCTAIKRVLVHENVADELVSLVKEQVAKLSVGSPEQDSTIVPLIDDKSADFVQGLVDDAVEKGATIVIGNKRERNLIYPTLIDHVTEEMKVAWEEPFGPILPIIRVSSDEQAIEIANKSEFGLQASVFTKDINKAFAIANKIETGSVQINGRTERGPDHFPFIGVKGSGMGAQGIRKSLESMTREKVTVLNLV

SEQ ID NO: 416 - protein, 496 aa, Arabidopsis thaliana
MAGTGLFAEILDGEVYKYYADGEWKTSSSGKSVAIMNPATRKTQYKVQACTQEEVNAVMELAKSAQKSWAKTPLWKRAELLHKAAAILKDNKAPMAESLVKEIAKPAKDSVTEVVRSGDLISYCAEEGVRILGEGKFLLSDSFPGNDRTKYCLTSKIPLGVVLAIPPFNYPVNLAVSKIAPALIAGNSLVLKPPTQGAVSCLHMVHCFHLAGFPKGLISCITGKGSEIGDFLTMHPAVNCISFTGGDTGISISKKAGMIPLQMELGGKDACIVLDDADLDLVASNIIKGGFSYSGQRCTAVKVVLVMESVADELVEKVKAKVAKLTVGPPEENSDITAVVSESSANFIEGLVMDAKEKGATFCQEYKREGNLIWPLLLDNVRPDMRIAWEEPFGPVVPVLRINSVEEGINHCNASNFGLQGCVFTKDINKAILISDAMETGTVQINSAPARGPDHFPFQGLKDSGIGSQGVTNSINLMTKVKTTVINLPTPSYSMG

SEQ ID NO: 417 - protein, 486 aa, Bacillus litoralis
MLASVSAIKVTDYKFYVNGQWKESQSGQTIDIRSPYLYEVMGRVQVITKEEVDEAIGFARGAQIEWAETPLQERAKYLYKWADELVNMQDEIAEIIMTEVGKGLKDAKNEVVRTADFIRYTVEEALHMHGESMKGDSFPGGSKSKIAMIERVPLGIVLAISPFNYPVNLSAAKLAPALIAGNAVIFKPATQGAISGIKMIEALHKAGFPKGLVNLITGRGSVIGDYLVEHKGIDMISFTGGTNTGVHLAKKAAMIPLVLELGGKDPGIVREDADLVEAAKQIISGAFSYSGQRCTAIKRVLVHESIADELVGILKGEIEKLAVGSPEEGNTVVPLIDDQSADFVQGLIDDAIERGATVVIGHKRERNLIYPTLLDHVTEDMSVAWEEPFGPVLPVIRISSDEEAIDIANKSEFGLQASVFTKDINKAFAIANKIETGSVQINGRTERGPDHFPFIGVKGSGMGAQGIRRSIESMTREKVTVLNLSL

SEQ ID NO: 418 - protein, 476 aa, Streptococcus hyointestinalis
MTKAYKNYVNGEWKLSEESIEIFAPATGESLGTVPAMTTAEVDEVYAKAKAAQPAWRALSYVERAAYLHKVADILVRDAEKIGAVLSKEIAKGYKSAVSEVIRTAEIINYAAEEGLRMEGEVLEGGSFEAASKNKIAIVRREPVGLVLAISPFNYPINLAGSKIAPALISGNVVALKPPTQGSISGLLLAEAFAEAGLPAGVFNTITGRGSVIGDYIVEHEAVNFINFTGSTPIGERIGKLAGMRPIMLELGGKDSAIVLEDADLDLTAKNIIAGAFGYSGQRCTAVKRVLVMDSVADELVEKIRQQVLDLTIGNPEDDADITPLIDKNAADFVEGLINDASDKGAEALTEIKREGNLICPVLFDKVTTDMRLAWEEPFGPVLPIIRVKSVEEAIEISNKSEYGLQASVFTNNFPLAFKIASQLEVGTVHINNKTQRGTDNFPFLGAKKSGAGVQGVKYSIEAMTSVKSVVFDIAK

SEQ ID NO: 419 - protein, 498 aa, Zea mays
MALAGTGVFAEILDGEVYRYYADGEWRTSASGKSVAIVNPTTRKTQYRVQACTQEEVNKAMDAAKVAQKAWARTPLWKRADVLHKAAAILKEHKAPIAECLVKEIAKPAKDAVSEVVRSGDLVSYTAEEGVRILGEGKLVVSDSFPGNERNKYCLSSKIPLGVVLAIPPFNYPANLAGSKIGPALIAGNALVLKPPTQGAVAALHMVHCFHLAGFPKGLISCVTGKGSEIGDFLTMHPGVNCISFTGGDTGIAISKKAGMVPLQMELGGKDACIVLEDADLDLVSANIVKGGFSYSGQRCTAVKVVLIMESIADAVVQKVNAKLAKLKVGPPEDDSDITPVVTESSANFIEGLVMDAKEKGATFCQEYRREGNLIWPLLLDHVRPDMRIAWEEPFGPVLPVIRINSVEEGIHHCNASNFGLQGCIFTRDINKAILISDAMETGTVQINSAPARGPDHFSFQGLKDSGIGSQGITNSINMMTKVKSTVINLPSPSYTMG

SEQ ID NO: 420 - protein, 476 aa, Lactobacillus delbrueckii
MTEHYLNYVNGEWRDSADAIEIFEPATGKSLGTVPAMSHEDVDYVMNSAKKALPAWRALSYVERAAYLQKAADILYRDAEKIGSTLSKEIAKGLKSSIGEVTRTAEIVEYTAKVGVTLDGEVMEGGNFEAASKNKLAVVRREPVGLVLAISPFNYPVNLAGSKIAPALMGGNVVAFKPPTQGSISGLLLAKAFAEAGLPAGVFNTITGRGRVIGDYIVEHPAVNFINFTGSSAVGKNIGKLAGMRPIMLELGGKDAAIVLEDADLDLTAKNIVAGAFGYSGQRCTAVKRVLVMDSVADELVEKVTALAKDLTVGIPEEDADITPLIDTKSADYVQGLIEEAAEKGAKPLFDFKREGNLIYPMVMDQVTTDMRLAWEEPFGPVLPFIRVKSADEAVMIANESEYGLQSSVFSRNFEKAFAIAGKLEVGTVHINNKTQRGPDNFPFLGVKSSGAGVQGVKYSIQAMTRVKSVVFNIED

SEQ ID NO: 421 - protein, 475 aa, Streptococcus pluranimalium
MSKQYKNLVNGEWKLSDNDIKIYAPATGEELGSVPAMSQEDVDYVYETARAAQPAWRALSYVERAAYLHKAADILVRDAEKIGAVLSKEVAKGYKAAVSEVIRTAEIVRYAAEEGVRMEGEVLEGGSFDAASKKKIAIVRREPLGLVLAISPFNYPVNLAGSKIAPALISGNVVALKPPTQGSISGLLLAEVFAEAGLPAGVFSTITGRGSVIGDYIVEHEAVNFINFTGSTPVGERIGKMAGMRPIMLELGGKDSAIVLKDADLEKAAKNIVDGAFGYSGQRCTAVKRVLVQEEVADELVEIIREKVLKLTIGNPEDNADITPLIDTGAADFVEGLINDAVEKGAEVKTEIKREGNLICPVLFDKVTTDMKLAWEEPFGPVLPVIRVKSVEEAIEISNQSEYGLQASVFTNDFPLAFSIAEQLEVGTVHINNKTQRGTDNFPFLGAKKSGAGVQGVKYSIEAMTSVKSVVFDIK

SEQ ID NO: 422 - protein, 496 aa, Nicotiana plumbaginifolia
MAGNGVFVDIIEGDVFKYYSEGEWKKSASGKSVAIINPTTRKTQYKVQACTQEEVNKVMEVAKTAQKSWAKTPLWKRAELLHKAAAILKEHKAPIAECLVKEIAKPAKDAVTEVVRSGDLVSYTAEEGVRILGEGKFLVSDSFPGNERTKYCLTSKIPLGVILAIPPFNYPVNLAVSKIAPALIAGNSLVLKPPTQGAVACLHMVHCFHLAGFPKGLISCVTGKGSEIGDFLTMHPGVHCISFTGGDTGVAISKKAGMIPLQMELGGKDACIVLEDADLDLAAGSIVKGGFSYSGQRCTAVKVVLVMESVADALVEKVNAKVAKLTVGPPEDDCDITPVVSESSANFIEGLVMDAKQKNATFCQQYKREGNLIWPLLLDNVRPDMRIAWEEPFGPVLPVIRINSVEEGIHHCNASNFGLQGCVFTKDINKAILISDAMETGTVQINSAPARGPDHFPFQGIKDSGIGSQGITNSINMMTKVKTTVINLPTPSYTMG

SEQ ID NO: 423 - protein, 475 aa, Streptococcus macacae
MTKQYKDYVNGEWKLSKNDIKIYEPASGAELGLVPAMSTEEVDYVYASAHKALKEWRALSYVERAAYLHKVADILERDAEKIGAVLSKEVAKGYKSAVSEVIRTAEIINYAAEEGLRMEGEVLEGGSFEAASKKKIAVVRREPVGLVLAISPFNYPVNLAGSKIAPALIAGNVVAFKPPTQGSISGLLLAEAFAEAGLPAGVFNTITGRGSEIGDYIVEHPAVNFINFTGSTPIGERIGRMAGMRPIMLELGGKDSAIVLEDADLELTAKNIVAGAFGYSGQRCTAVKRVLVMEGVADKLVEKIREKVLALTIGNPENDADITPLIDTKAADFVEGLINDAKEKGADNLTEIKREGNLICPVLFDKVTTDMRLAWEEPFGPVLPIIRVKSVEEAIAISNQSEYGLQASIFTNDFPRAFGIAEQLEVGTVHLNNKTQRGTDNFPFLGAKKSGAGIQGVKYSIEAMTTVKSVVFDIK

SEQ ID NO: 424 - protein, 475 aa, Streptococcus mutans
MTKQYKNYVNGEWKLSENEIKIYEPASGAELGSVPAMSTEEVDYVYASAKKAQPAWRSLSYIERAAYLHKVADILMRDKEKIGAVLSKEVAKGYKSAVSEVVRTAEIINYAAEEGLRMEGEVLEGGSFEAASKKKIAVVRREPVGLVLAISPFNYPVNLAGSKIAPALIAGNVIAFKPPTQGSISGLLLAEAFAEAGLPAGVFNTITGRGSEIGDYIVEHQAVNFINFTGSTGIGERIGKMAGMRPIMLELGGKDSAIVLEDADLELTAKNIIAGAFGYSGQRCTAVKRVLVMESVADELVEKIREKVLALTIGNPEDDADITPLIDTKSADYVEGLINDANDKGAAALTEIKREGNLICPILFDKVTTDMRLAWEEPFGPVLPIIRVTSVEEAIEISNKSEYGLQASIFTNDFPRAFGIAEQLEVGTVHINNKTQRGTDNFPFLGAKKSGAGIQGVKYSIEAMTTVKSVVFDIK

SEQ ID NO: 425 - protein, 479 aa, Bacillus cereus; identical to SEQ ID NO: 415

SEQ ID NO: 426 - protein, 477 aa, Streptococcus thermophilus
MAKQYKNYVNGEWKTSENSITIYAPANGEELGSVPAMSQAEVDEVYAAAKAALPAWRALSYAERAAYLHKAADILERDAEKIGQVLSKEISKGLKSAIGEVVRTAEIIHYAAEEGLRLEGEVLEGGAFDAGSKKKIAVVRREPVGLVLAISPFNYPVNLAGSKIAPALIAGDVVAFKPPTQGSISGLLLVEAFVEAGIPAGVLNSITGRGSVIGDYIVEHKAVDFINFTGSTPVGENIGRLAAMRPVMLELGGKDAAIVLEDADLDLTAKNIVAGAFDYSGQRCTAIKRVLVMDSVADELVEKVTALVGNITVGMPEESASVTPLIDTKAADFVQGLIDDAVEQGATAKTELKREGNLIYPAVFDHVTTDMRLAWEEPFGPVLPFIRVSSVEEAIKISNESEFGLQGAVFTQDYPRAFAIAEQLEVGTVHINNKTQRGTDNFPFLGVKGSGAGTQGVKYSIEAMTRVKSTVFDISDY

SEQ ID NO: 427 - protein, 475 aa, Streptococcus urinalis
MTKQYKNYVNGEWKLSENEIKIYAPASGEELGSVPAMTQAEVDDVYASAKAALPAWRALSYVERANYLHKAADILVRDAEKIGSVLSQEVAKGHKSAVSEVIRTAEIINYAAEEGLRMEGEVLEGGSFEAASKKKIAIVRREPVGLVLAISPFNYPVNLAGSKIAPALIAGNVVALKPPTQGSISGILLAQAFAEAGIPAGVFNTITGRGSVIGDYIVEHEAVNFINFTGSTPVGERIGKLAGMRPIMLELGGKDSAIVLEDADLDVAAKNIVAGAFGYSGQRCTAVKRVLVMDSVADALVEKVSQKVSALTIGNPEDDADITPLIDTKAADFVEGLINDAKEKGAQPLHEIKREGNLVCPLVFDKVTTDMRLAWEEPFGPVLPFIRVKSVEEAIKISNESEYGLQASVFTNNFPRAFAIAEQLEVGTVHINNKTQRGTDNFPFLGAKKSGAGVQGVKYSIEAMTSVKSVVFDIE

SEQ ID NO: 428 - protein, 475 aa, Streptococcus canis
MTTQYKNLVNGEWKLSENEIKIYAPATGEELGSVPAMSREEVDAVYGAARQALAGWRALSYVERAAFLHKAADILVRDAEKIGAILSKEVAKGHKAAVSEVIRTAEIINYAAEEGLRMEGEVLEGGSFEAASKKKIAIVRREPVGLVLAISPFNYPVNLAGSKIAPALIAGNVVALKPPTQGSISGLLLAEAFAEAGIPAGVFNTITGRGSVIGDYIVEHEAVNFINFTGSTPIGERIGKLAGMRPIMLELGGKDSAIVLEDADLDLAAKNIVAGAFGYSGQRCTAVKRVLVMESVADDLVEKIRDKVLQLTIGNPEDNADITPLIDTSAADFVEGLIKDAVDKGATAHTDIKREGNLICPILFDHVTTDMRLAWEEPFGPVLPIIRVASVEEAIKISNESEYGLQASIFTTNFPQAFGIAEQLEVGTVHINNKTQRGTDNFPFLGAKKSGAGVQGVKYSIEAMTSVKSVVFDIQ

SEQ ID NO: 429 - protein, 475 aa, Streptococcus thoraltensis
MSKQYKNLVNGEWKLSDNEIKIYAPATGEELGSVPAMSQEEVDYVYETAKAAQPAWRALSYVERAAYLHKVADILDRDAEKIGEVLSKEIAKGYKAAVSEVTRTADIIRYAAEEGVRMQGEVLEGGSFDAASKKKIAMVRREPLGLVLAISPFNYPVNLAGSKIAPALISGNVVALKPPTQGSISGLVLAEVFAEAGIPAGVFSTITGRGSVIGDYIVEHEAVNFINFTGSTPVGERIGKMAGMRPIMLELGGKDSAIVLEDADLEVAAKNIVDGAFGYSGQRCTAVKRVLVMDSVADELVEMLREKVLKLTVGNPEDNADITPLIDTAAADFVEGLVNDAVEKGADAKTDILREGNLIYPILFDNVTTDMKLAWEEPFGPVLPVIRVSSVEEAIEISNKSEYGLQASVFTNDFPLAFSIAEQLEVGTVHINNKTQRGTDNFPFLGAKKSGAGTQGVKYSIEAMTTVKSVVFDIK

SEQ ID NO: 430 - protein, 475 aa, Streptococcus dysgalactiae
MTTQYKNLVNGDWKLSESDIKIYAPATGEELGSVPAMTQAEVDAVYASAKKALPAWRALSYVERAAYLHKAADILVRDAEKIGAVLSKEVAKGHKAAVSEVIRTAEIINYAAEEGLRMEGEVLEGGSFEAASKKKIAIVRREPVGLVLAISPFNYPVNLAGSKIAPALIAGNVVALKPPTQGSISGLLLAEAFAEAGIPAGVFNTITGRGSVIGDYIVEHEAVNFINFTGSTPIGEGIGKLAGMRPIMLELGGKDSAIVLEDADLALAAKNIVAGAFGYSGQRCTAVKRVLVMDKVADQLAAEIKTLVEKLSVGMPEDDADITPLIDTKAADFVEGLIKDAADKGATALTTFNREGNLISPVLFDHVTTDMRLAWEEPFGPVLPIIRVTSVEEAIEISNASEYGLQASIFTNNFPKAFGIAEQLEVGTVHLNNKTQRGTDNFPFLGAKKSGAGVQGVKYSIEAMTTVKSVVFDIQ

SEQ ID NO: 431 - protein, 475 aa, Streptococcus pyogenes
MAKQYKNLVNGEWKLSENEITIYAPATGEELGSVPAMTQAEVDAVYASAKKALPAWRALSYVERAAYLHKAADILVRDAEKIGAVLSKEVAKGHKAAVSEVIRTAEIINYAAEEGLRMEGEVLEGGSFEAASKKKIAIVRREPVGLVLAISPFNYPVNLAGSKIAPALIAGNVVALKPPTQGSISGLLLAEAFAEAGIPAGVFNTITGRGSVIGDYIVEHEAVNFINFTGSTPIGEGIGKLAGMRPIMLELGGKDSAIVLEDADLALAAKNIVAGAFGYSGQRCTAVKRVLVMDKVADQLAAEIKTLVEKLSVGMPEDDADITPLIDTKAADFVEGLIKDATDKGATALTAFNREGNLISPVLFDHVTTDMRLAWEEPFGPVLPIIRVTTVEEAIKISNESEYGLQASIFTTNFPKAFGIAEQLEVGTVHLNNKTQRGTDNFPFLGAKKSGAGVQGVKYSIEAMTTVKSVVFDIQ

SEQ ID NO: 432 - protein, 475 aa, Streptococcus ictaluri
MTKEYKNLVNGEWKLSDNNITIYEPATGKALGSVPAMSQEEVDYVYASAKQALPKWRALSYVERAAYLHKAADILVRDAEKIGAILSKEVAKGFKAAVSEVVRTAEIINYAAEEGLRMQGEVLEGGSFEAASKKKIAIVRREPVGLVLAISPFNYPVNLAGSKIAPALIAGNVVALKPPTQGSISGLLLAEAFAEAGIPAGVFNTITGRGSVIGDYIVEHEAVNFINFTGSTAIGEGIGKLAGMRPIMLELGGKDSAIVLEDADLVLAAKNIVSGAFGYSGQRCTAVKRILVMDSVADQLASEIKILVEQLSVGIPEEDADITPLIDTKAADFVEGLIDDAKAKGALALTECKRDNNLISPVLFDRVTTDMRLAWEEPFGPVLPLIRVSSVEEAIEISNASEYGLQASIFTNNFPQAFAIAEQLEVGTVHLNNKTQRGTDNFPFLGAKKSGAGVQGVKYSIEAMTNLKSVVFDIK

SEQ ID NO: 433 - protein, 486 aa, Clostridium perfringens
MFSCIKGKERTFRNLINGEWINSSSDKFIDIYSPVGNCLVGKVPAMTTDEVDLAIKSAKEAQKVWRNVPVNKRAEILYKAADILIEKVEDIAEIMMREIGKDKKSAESEILRSADYIKFTADTAKNLSGESIPGDSFPGFKRNKISLVTREPLGVVLAISPFNYPINLAASKIAPALVAGNSVVLKPATQGSLCGLYLAKVFEQAGVPAGVLNTVTGRGSEIGDYIVTHPEIDFINFTGSTEVGTRISRITTMVPLLMELGGKDAAIVLADADLDLAASNIVAGAYSYSGQRCTAVKRILVVNEVADKLVEKVKEKVQNLKIGNPLEEDVDIVPLIDSKAADFVWELIDDAREKGAHLLVGGTREENMIYPTLFDNVTTDMRLAWEEPFGPVLPIIRVKDKDEAIEIANKSEYGLQSSVFTENINEAFYVADRLEVGTVQVNNKTERGPDHFPFLGVKASGIGTQGIRYSIESMSRPKATVINLVR

SEQ ID NO: 434 - protein, 486 aa, Clostridium chromiireducens
MFNCIKCENNNFKNLINGEWVGNKDNKVIEIYSPLDNSLVGTVPAMTQEDIDHVIQVAKDGQREWSKVPMNERAEILYKAADILVENANELVDIMIREIGKDRKSSKSEIHRTADFIRFTADTAKNMAGESIPGDTFPGFKRNKISVVNREPLGVVLAISPFNYPINLSASKIAPAIIVGNSVVLKPATQGSLCGLYLAKVFQEAGVPNGVLNTITGKGSEIGDYAVTHKGVNFINFTGSTEVGVKISKITSMVPLLMELGGKDAAIVLKDADLDLAANNIVAGGYSYSGQRCTAVKRILVLEKVADELVKKVKEKMSNLTVGNPLDKDVDIVPLISTKSADFVEELIKDAIDKGADLVVGGKRDGNLIYPTLFDNVTGDMRIAWEEPFGPVLPIMRVKDKDEAIEIANKSEYGLQGAVFTENIEDAFYVADRLEVGTVQVNNKTERGPDHFPFLGVKASGIGTQGIRYSIESMSRPKATVINLVR

SEQ ID NO: 435 - protein, 486 aa, Clostridium botulinum
MFNHIKDENNTFKNLINGEWVSSRSFVEIKSPLSNSLLGRVPAMTKEEVDIAVQTAKEAQKKWNKITINERAEILYKASDILLENIDELSELMMMEIAKDRKSCRSEVSRTSDFIKFTADTAKNLSGESIPGDSFPGFKNNKVSIVKREPLGVVLAISPFNYPINLSASKIAPGLMAGNSVVLKPATQGSLCGLYLARIFEKAGVPAGVLNTITGKGSEIGDYITTHKGINFINFTGSTEVGARISKMTSMVPLLMELGGKDAAIVLEDADLELTASNIVAGGYSYSGQRCTAVKRILVVDKVADKLLEKIKEKMKKLTVGNPLEKDVDIVPLISSKAADFVIELIEDAKSKGADLIVGGNREGNLIYPTLFDNVTTDMRLAWEEPFGPVLPIIRVKDKDEAIEIANKSEYGLQSAVFTKNINDAFYVADKLEVGTVQINNKTERGPDNFPFMGVKASGIGTQGIKYSIESMSRPKATIINLSIHN

SEQ ID NO: 436 - protein, 479 aa, Bacillus anthracis
MTTSNTYKFYLNGEWRESSSGETIEIPSPYLHEVIGQVQAITRGEVDEAIASAKEAQKSWAEASLQDRAKYLYKWADELVNMQDEIADIIMKEVGKGYKDAKKEVVRTADFIRYTIEEALHMHGESMMGDSFPGGTKSKLAIIQRAPLGVVLAIAPFNYPVNLSAAKLAPALIMGNAVIFKPATQGAISGIKMVEALHKAGLPKGLVNVATGRGSVIGDYLVEHEGINMVSFTGGTNTGKHLAKKAAMIPLVLELGGKDPGIVREDADLQDAANHIVSGAFSYSGQRCTAIKRVLVHENVADELVGLLKEQVAKLSVGSPEQDSTIVPLIDDKSADFVQGLVDDAVEKGATIVIGNNRERNLIYPTLIDHVTEEMKVAWEEPFGPILPIIRVSSDEQAIEIANKSEFGLQASVFTKDINKAFAIANKIETGSVQINGRTERGPDHFPFIGVKGSGMGAQGIRKSLESMTREKVTVLNLV

SEQ ID NO: 437 - protein, 334 aa, Pyrococcus furiosus
MKIKVGINGYGTIGKRVAYAVTKQDDMELIGVTKTKPDFEAYRAKELGIPVYAASEEFLPRFEKAGFEVEGTLNDLLEKVDIIVDATPGGMGEKNKQLYEKAGVKAIFQGGEKAEVAQVSFVAQANYEAALGKDYVRVVSCNTTGLVRTLNAIKDYVDYVYAVMIRRAADPNDIKRGPINAIKPSVTIPSHHGPDVQTVIPINIETSAFVVPTTIMHVHSIMVELKKPLTREDVIDIFENTTRVLLFEKEKGFESTAQLIEFARDLHREWNNLYEIAVWKESINVKGNRLFYIQAVHQESDVIPENIDAIRAMFEIAEKWESIKKTNKSLGILK

SEQ ID NO: 438 - protein, 319 aa, Aspergillus niger
MASPTVKLNSGYDMPLVGFGLWKVNNDTCADQIYHAIKEGYRLFDGACDYGNEVEAGQGIARAIKDGLVKREELFIVSKLWNSFHDGDRVEPICRKQLADWGIDYFDLYIVHFPISLKYVDPAVRYPPGWKSEKDELEFGNATIQETWTAMESLVDKKLARSIGISNFSAQLVMDLLRYARIRPATLQIEHHPYLTQTRLVEYAQKEGLTVTAYSSFGPLSFLELSVQNAVDSPPLFEHQLVKSIAEKHGRTPAQVLLRWATQRGIAVIPKSNNPQRLKQNLDVTGWNLEEEEIKAISGLDRGLRFNDPLGYGLYAPIF

SEQ ID NO: 439 - protein, 319 aa, Aspergillus oryzae
MAPPTVKLNSGFDMPLVGFGLWKVNNETCADQVYEAIKAGYRLFDGACDYGNEVECGQGVARAIKEGIVKREDLFIVSKLWNSFHEGDRVEPVCRKQLADWGVEYFDLYIVHFPVALKYVDPAVRYPPGWNSESGKIEFSNASIQETWTAMESLVDKKLARSIGVSNFSAQLLMDLLRYARVRPATLQIEHHPYLTQPRLVEYAQKEGIAVTAYSSFGPLSFLELEVKNAVNTTPLFEHNTIKSLAEKYGKTPAQVLLRWATQRGIAVIPKSNNPTRLALNLEVTGWDLEKTELEAISSLDQGLRFNDPLGYGMYVPIF

SEQ ID NO: 440 - protein, 324 aa, Magnaporthe oryzae
MASPTMKLNNGLDMPQVGFGLWKVENSVCADVVYNAIKAGYRLFDGACDYGNEVECGQGVKRAIDEGLVKREELFIVSKLWNTFHDGERVEPIVKKQLADWGIEYFDLYLIHFPVALEYVDPSVRYPPGWHYDDAGTEIRPSKASIQETWTAMEKLVDAGLSKAIGVSNFQAQLLYDMLRYARIRPATLQIEHHPYLVQQRLIEACKTEGIVVTAYSSFGPASFKEFNMEHAEALTPLLEEPTIVKLAEKYGKDPGQVLLRWATQRGLAVIPKSSREKTMKSNFEAVGWDMEDSDIKTISALDKGIRFNQPANYFSTDKLWIFG

SEQ ID NO: 441 - protein, 317 aa, Meyerozyma guilliermondii
MSITLNSGYEMPSVGFGCWKVDKATCADTIYNAIKVGYRLFDGAEDYGNEKEVGEGINRALDEGLVARDELFVVSKLWNSFHDPKNVEKALDRTLSDLKVDYLDLFLIHFPIAFKFVPFEEKYPPGFYCGDGDKFIYEGVPIIDTWRALEKMVEKGKIRSIGISNFPGALIQDLLRGAKIKPAVLQIEHHPYLQQPRLIEYVQSQGIAITAYSSFGPQSFVELNHPRVKDVKPLFEHDVIKSVAEKANKTPAQVLLRWATQRGLAVIPKSNNPDRLLSNLKVNDFDLSQEDFKEISKLDIELRFNNPWDWDKIPTFV

SEQ ID NO: 442 - protein, 318 aa, Scheffersomyces stipites
MPSIKLNSGYDMPAVGFGCWKVDVDTCSEQIYRAIKTGYRLFDGAEDYANEKLVGAGVKKAIDEGIVKREDLFLTSKLWNNYHHPDNVEKALNRTLSDLQVDYVDLFLIHFPVTFKFVPLEEKYPPGFYCGKGDNFDYEDVPILETWKALEKLVKAGKIRSIGVSNFPGALLLDLLRGATIKPSVLQVEHHPYLQQPRLIEFAQSRGIAVTAYSSFGPQSFVELNQGRALNTSPLFENETIKAIAAKHGKSPAQVLLRWSSQRGIAIIPKSNTVPRLLENKDVNSFDLDEQDFADIAKLDINLRFNDPWDWDKIPIFV

SEQ ID NO: 443 - protein, 362 aa, Meyerozyma caribbica
MTPNPSLVLNKVNDITFETLEAPTLLEPNEVMVEVKKTGICGSDIHYYSHGKIGDFVLTQPMVLGHESAGVVTAVGPKVTSLKVGDRVAIEPGVPSRFSDEYKSGHYQLCPHIVFAATPDPKHGSPSPPGTLCKYYKSPEDFLVKLPDCVSLELGAMVEPLSVGVHGCRQAKVTFGDVVVVFGGGPVGLLAAAAATKFGAAKVMVVDVIDDKLKMALEVGVATHTFNSKSGGADDLVKELGERPDVVIECTGAEVCINLGIESLKMGGRFSQVGNATRPVSFPIVAFSSRELTLYGSFRYGYNDYKTSVAILEHNYRNGRENAAIDFEKLITHRFKFEDAKKAYDYIRDGNVAVKVIIDGPE

SEQ ID NO: 444 - protein, 377 aa, Trichoderma reesei
MSPSAVDDAPKATGAAISVKPNIGVFTNPKHDLWISEAEPSADAVKSGADLKPGEVTIAVRSTGICGSDVHFWHAGCIGPMIVEGDHILGHESAGEVIAVHPTVSSLQIGDRVAIEPNIICNACEPCLTGRYNGCEKVEFLSTPPVPGPLRRYVNHPAVWCHKIGNMSWENGALLEPLSVALAGMQRAKVQLGDPVLVCGAGPIGLVSMLCAAAAGACPLVITDISESRLAFAKEICPRVTTHRIEIGKSAEETAKSIVSSFGGVEPAVTLECTGVESSIAAAIWASKFGGKVFVIGVGKNEISIPFMRASVREVDIQLQYRYSNTWPRAIRLIESGVIDLSKFVTHRFPLEDAVKAFETSADPKSGAIKVMIQSLD

SEQ ID NO: 445 - protein, 365 aa, Meyerozyma guilliermondii
MATSLVSHSMTFTNPSLQVTKNHTLELNETAVNRPQPGQVLLHVRATGICGSDIHFWKTGAIGELKVLGNCTLGHEAAGEVIEVGENVTNVAAGDRVAIEPGVPCGNCFLCSQGDYNLCEQVQFIGVYPYHGSMQRFLVHDARYVHKLPDNMSYEKGALVEPASVAYHAIERAQLRLGGGVLVAGAGPIGLFTLLLAKASGCTPLCITDISQDRLDFAKKLVPELKTYRINPKLTPQETGLEIKKQFGPTEYHAPHVSLECTGVESSINCCAYATRRSGTLMVVGVGKDEIKIPFMTLSLAEVDVKFINRYHHSWAPVIKLISEGIIKVEPLVTHRFPLEQAKAALECSQDPTSGSIKVMIVDTE

SEQ ID NO: 446 - protein, 359 aa, Candida arabinofermentans
MVSLPKPTNPSLVVNEKHSIFMQDAPIVEPGANKVLVHVRACGICGSDVHFWKMGQIGELVVEGNCILGHEACGDVISVGENVTKVKVGDRVAVEPQLPCGKCYLCMDGNYNLCKEVEFSSVYPHNGLMQRYKVHDERFVHKIPDKMTYAQGALVEPVSVAYHGVERSQLTLGKAAMVAGAGPIGLCTLALAKASGATPLLITDISSKRLEFAKKLIPEVTTYQIDTKKSNWENAQEIRKLFGPTEYEQPPCVLECTGVESSIITGGFVTRRGGTLTVLGVGRGDINNFPFMHLSLAEIDVKFINRYHDSWPACINLIANKVINVDSLVTHRFPLEQAVQAMEVSSDPSNGNIKVMIED

SEQ ID NO: 447 - protein, 362 aa, Candida carpophila
MTPNPSLVLNKVNDITFETLEAPTLLEPNEVMVEVKKTGICGSDIHYYTHGKIGDFVLTQPMVLGHESAGVVTAVGSAVKSLKVGDRVAIEPGIPSRFSEEYKSGRYQLCPHIVFAATPDPGHGSPSPPGTLCKYYKSPEDFLVKLPDCVSLELGAMVEPLSVGVHGCKQAKVTFGDVVVVFGGGPVGLLAAAAATKFGAAKVMVVDVIDDKLKMALEVGVATHTFNSKLGGADELIKALGERPDVVVECTGAEVCINLGIESLKMGGRFSQVGNSIRPVNFPIVAFSSRELTLYGSFRYGYNDYKTSVAILEHNYRNGRENAAIDFEKLITHRFKFEDAKKAYDYIRDGNVAVKVIIDGPE

SEQ ID NO: 448 - protein, 388 aa, Talaromyces emersonii
MAAGISLTKPNIGVYTNPNHDLWVADAKPTLEEVKSGSDLKPGQVTVEIRSTGICGSDVHFWHAGCIGPMIVTGDHILGHESAGVVIAVAPDVKTLKPGDRVAIEPNIICNKCEPCLTGRYNGCEAVEFLSTPPVDGLLRRYVNHPAIWCHKIGDMSFEDGALLEPLSVALAGMDRAGVRLGDPVLVAGAGPIGLVTLLCVRAAGATPIVITDIDEGRLRFAKELVPEVRTYRVQTGLSAEENAAGILDALNDGNGSAPDAIRPRVAMECTGVESSVASAIWSVKFGGKVFVIGVGKNEMKVPFMRLSTWEIDLQYQYRYCNTWPKAIRLVKNGVINLKKLVTHRFPLEDAVKAFETAANPKTGAIKVQIMSSEEDIKAASGVNGASN

SEQ ID NO: 449 - protein, 382 aa, Aspergillus oryzae
MATATVLEKANIGVYTNTNHDLWVAESKPTLEEVKSGESLKPGEVTVQVRSTGICGSDVHFWHAGCIGPMIVTGDHILGHESAGEVIAVASDVTHLKPGDRVAVEPNIPCHACEPCLTGRYNGCEKVLFLSTPPVDGLLRRYVNHPAVWCHKIGDMSYEDGALLEPLSVSLAAIERSGLRLGDPVLVTGAGPIGLITLLSARAAGATPIVITDIDEGRLAFAKSLVPDVITYKVQTNLSAEDNAAGIIDAFNDGQGSAPDALKPKLALECTGVESSVASAIWSVKFGGKVFVIGVGKNEMKIPFMRLSTQEIDLQYQYRYCNTWPRAIRLVRNGVISLKKLVTHRFLLEDALKAFETAADPKTGAIKVQIMSNEEDVKGASA

SEQ ID NO: 450 - protein, 363 aa, Neurospora crassa
MASSASKTNIGVFTNPQHDLWISEASPSLESVQKGEELKEGEVTVAVRSTGICGSDVHFWKHGCIGPMIVECDHVLGHESAGEVIAVHPSVKSIKVGDRVAIEPQVICNACEPCLTGRYNGCERVDFLSTPPVPGLLRRYVNHPAVWCHKIGNMSYENGAMLEPLSVALAGLQRAGVRLGDPVLICGAGPIGLITMLCAKAAGACPLVITDIDEGRLKFAKEICPEVVTHKVERLSAEESAKKIVESFGGIEPAVALECTGVESSIAAAIWAVKFGGKVFVIGVGKNEIQIPFMRASVREVDLQFQYRYCNTWPRAIRLVENGLVDLTRLVTHRFPLEDALKAFETASDPKTGAIKVQIQSLE

SEQ ID NO: 451 - protein, 377 aa, Trichoderma reesei
MSPSAVDDAPKATGAAISVKPNIGVFTNPKHDLWISEAEPSADAVKSGADLKPGEVTIAVRSTGICGSDVHFWHAGCIGPMIVEGDHILGHESAGEVIAVHPTVSSLQIGDRVAIEPNIICNACEPCLTGRYNGCEKVEFLSTPPVPGLLRRYVNHPAVWCHKIGNMSWENGALLEPLSVALAGMQRAKVQLGDPVLVCGAGPIGLVSMLCAAAAGACPLVITDISESRLAFAKEICPRVTTHRIEIGKSAEETAKSIVSSFGGVEPAVTLECTGVESSIAAAIWASKFGGKVFVIGVGKNEISIPFMRASVREVDIQLQYRYSNTWPRAIRLIESGVIDLSKFVTHRFPLEDAVKAFETSADPKSGAIKVMIQSLD

SEQ ID NO: 452 - protein, 386 aa, Aspergillus niger
MATATVLEKANIGVFTNTKHDLWVADAKPTLEEVKNGQGLQPGEVTIEVRSTGICGSDVHFWHAGCIGPMIVTGDHILGHESAGQVVAVAPDVTSLKPGDRVAVEPNIICNACEPCLTGRYNGCENVQFLSTPPVDGLLRRYVNHPAIWCHKIGDMSYEDGALLEPLSVSLAGIERSGLRLGDPCLVTGAGPIGLITLLSARAAGASPIVITDIDEGRLEFAKSLVPDVRTYKVQIGLSAEQNAEGIINVFNDGQGSGPGALRPRIAMECTGVESSVASAIWSVKFGGKVFVIGVGKNEMTVPFMRLSTWEIDLQYQYRYCNTWPRAIRLVRNGVIDLKKLVTHRFLLEDAIKAFETAANPKTGAIKVQIMSSEDDVKAASAGQKI

SEQ ID NO: 453 - protein, 385 aa, Penicillium rubens
MASATVTKTNIGVYTNPKHDLWIADSSPTAEDINAGKGLKAGEVTIEVRSTGICGSDVHFWHAGCIGPMIVTGDHVLGHESAGQVLAVAPDVTHLKVGDRVAVEPNVICNACEPCLTGRYNGCVNVAFLSTPPVDGLLRRYVNHPAVWCHKIGDMSYEDGAMLEPLSVTLAAIERSGLRLGDPLLITGAGPIGLISLLSARAAGACPIVITDIDEGRLAFAKSLVPEVRTYKVEIGKSAEECADGIINALNDGQGSGPDALRPKLALECTGVESSVNSAIWSVKFGGKVFVIGVGKNEMTIPFMRLSTQEIDLQYQYRYCNTWPRAIRLIQNGVIDLSKLVTHRYSLENALQAFETASNPKTGAIKVQIMSSEEDVKAATAGQKY

SEQ ID NO: 454 - protein, 298 aa, Aspergillus brasiliensis
MSRPLEGKLAIVTGGSRGIGEAIAHNLASKGCSLLLNYTSDSSRARTESLCTTLTTTHNITCIPVQADLSDPTPAITTILTAAKTHFTSPTTNTLTIDILINNAGVSKDRFLNDPSSGPIDPAYFNWHYTINVLAPLLLTQACAEYLPRTPAHSGRIINISSISSSLGFTGQSVYGGTKAALEAMTRTWARELADVATVNAVNPGPVVGDMYFATGEEFWKQMQGFQDNAPLSKLQDGEVEENGLTEEQGRLIREKMGGRRPAFTKEIAGVVGMLCTEDGAWCTGSVVCANGGLKFTT

SEQ ID NO: 455 - protein, 274 aa, Candida sorboxylosa
MAAVVPTFKLTNEVTILTGACGGLSHALLHSLLAYEAPVALFDRNMEALEATRQDMIKYCISELGIKAEDVPRMECYVCNIADAAEVEQACEKVYQDFGSYPLHLVNTAGYCENFPAEEYPASNAENLVKVNLLGSLYICQSFAKPLIKNNIKGGSIVMIGSMSGVIVNDPQPQIAYNMSKAGVIHMVKSLGVEWAKYGIRVNALSPGYIATPLTKNVINGNVDMYNRWISMIPMKRMSDPSEFSGTVLYLLSNSASSYTTGENIVVDGGYQCL

SEQ ID NO: 456 - protein, 271 aa, Brettanomyces anomalus
MANFPDFRLDGEVTVVTGACGGLSGAVIPGLLAYGSDIALLDMDEKNIQQSIEDFKKQAKEKLKLEKVPEMKGYVCDVSDAANVNQVFEKIHAEFGKYPLHLLNTAGYCENFPAEKYPAKNAARLISVNLLGSLYVAQAWARPLIENKVQGASAVMIGSMSGNIVNDPQPQICYNMSKAGVIHMVKTLAAEWSKYNIRINTLSPGYISGPLTAKVIQADPKMYDRWMSMVPMHRMAEPQEFAGTILYLLSNQASSYTTGANIIADGGYACW

SEQ ID NO: 457 - protein, 306 aa, Talaromyces leycettanus
MWSPTRASAATFARPLEGKFGIVTGGSRGIGEAIARNLAAKGCSLLLNFTSESSRARTEELCTSLASKHSIRCFSVQADLANAEEAVDKILAAAKQHFTSSEGKFRIDVLINNAGVSQDRFLNDPAKGPITPEYFNWHYNINVLAPLLLTQACAPFLPTDRSGRIVNISSVSSSIGFTGQSVYGGTKAALEAMTRTWARELADKATVNAVNPGPVIGDMYFKTGEDFWKQMQGFQDATPLSKMDEDDAGLQDLSEEQIRLIKEKMGGRRPAFTSEIAGVVGMLCTQDGAWCTGSVVCANGGMRMTV

SEQ ID NO: 458 - protein, 274 aa, Kuraishia capsulate
MDVVPSFRQDGKLTIITGGSGGLANPIAKALLANGSEIALIDMNLQRTQDAALEIADWGTEYFKQTGFSGVVPKVSAWVCDISDFSSVESCFAEIAESHGKLATNLVNTAGYCENFPAEDYPAANAEKLIKVNLLGSLYVAQALAKPLIKQGLTGSLVLIGSMSGSVVNNPQPQVAYNASKAGVIHMVKSLAAEWAKYNIRVNTLSPGYILTPLTKNVISGDVAMKNSWESQVPMKRLAEPKEFVGSILYLLSESGSSYTTGHDLIVDGGYTLW

SEQ ID NO: 459 - protein, 298 aa, Aspergillus aculeatus
MSGILAGKLAIITGGSRGIGEAIAHNLARKGCSLLLNYTSDSSRARTESLCTQLAREHSIRCVPVQADLSDPAPAIERILSVAKAEFSSSTQQQLTIDILINNAGVSKDRFLNDATKGAIDADYFNWHYTINVLAPLLLTQAIAPYLPRSPPRSGRIVNISSISSALGFTGQSVYGGTKAALEAMTRTWARELADVATVNAVNPGPVIGDMYFATGEAFWQQMQGFQDNTPGSKMVEDDPLVGQLTEEQKQLIKEKMGGRRPGFTAEVAGVVGMLCSEDAGWCTGSVVCANGGLRFTT

SEQ ID NO: 460 - protein, 274 aa, Pichia membranifaciens
MATGVPNFKLTNELTIITGACGGLSQALLHTLLAYEAPVALFDRNMEALKKTKEELVLFCTAELGVKADAVPQMECFACNIADAQEVEAACEAVYTAFGTYPLHLVNTAGYCENYPAEEYPAANAENLVKVNLLGSLYIAQSFARPLIKHGIRGGSIVMIGSMSGVIVNDPQPQIAYNMAKAGVIHMVKSLAAEWAKYNIRVNTLSPGYIATPLTKNVINGNADLYNRWMSMVPMKRMSDPSEFSGTVLYLLSNSASSYTTGENIVVDGGYQCW

SEQ ID NO: 461 - protein, 298 aa, Aspergillus niger
MSRSLEGKFAIITGGSRGIGEAIAHNLASKGCSLLLNYTSDSSRTRTESLCNTLSTTHKITCIPVQADLSDPAPAVNTIISAAKTHFTSPTTNTLTIDILINNAGVSKDRFLNDPSSGPIDPAYFNWHYTINVLAPLLLTQACAEYLPRKPAHSGRIINISSISSSLGFTGQSVYGGTKAALEAMTRTWARELADVATVNAVNPGPVVGDMYFATGEEFWKQMQGFQDNTPLSKLVDGEEAVEELLSEEQKRLIREKMGGRRPAFTREIAGVVGMLCTEDGAWCTGSVVCANGGLKFT

SEQ ID NO: 462 - protein, 266 aa, Trichoderma reesei LXR
MPQPVPTANRLLDLFSLKGKVVVVTGASGPRGMGIEAARGCAEMGADLAITYSSRKEGAEKNAEELTKEYGVKVKVYKVNQSDYNDVERFVNQVVSDFGKIDAFIANAGATANSGVVDGSASDWDHVIQVDLSGTAYCAKAVGAHFKKQGHGSLVITASMSGHVANYPQEQTSYNVAKAGCIHLARSLANEWRDFARVNSISPGYIDTGLSDFIDEKTQELWRSMIPMGRNGDAKELKGAYVYLVSDASSYTTGADIVIDGGYTTR

SEQ ID NO: 463 - protein, 272 aa, Ambrosiozyma monospora
MTDYIPTFRFDGHLTIVTGACGGLAEALIKGLLAYGSDIALLDIDQEKTAAKQAEYHKYATEELKLKEVPKMGSYACDISDSDTVHKVFAQVAKDFGKLPLHLVNTAGYCENFPCEDYPAKNAEKMVKVNLLGSLYVSQAFAKPLIKEGIKGASVVLIGSMSGAIVNDPQNQVVYNMSKAGVIHLAKTLACEWAKYNIRVNSLNPGYIYGPLTKNVINGNEELYNRWISGIPQQRMSEPKEYIGAVLYLLSESAASYTTGASLLVDGGFTSW

SEQ ID NO: 464 - protein, 274 aa, Candida arabinofermentans
MASIIPTFRLDGGLTVVTGASGGLADAIIKGLLAYGSEIALLDMNIERVKETQAELTKFCIEELKLKEDSIPKMAAFACDISDAEHVESVFHDIYVEFGKYPLYLVNTAGYCENFAAEDYPAKRAEKLVQVNLLGSLYVCQSFARPLIKNGIKGGSAVMIGSMSGEIVNDPQPQIAYNMAKAGVIHMVRTLGAEWSKYNIRVNTLSPGYILTPLTKNVINGNNEMYQRWLSMIPMNRMSEPKEFIGTVLYLLSNSASSYTTGTNVTVDGGYSLW

SEQ ID NO: 465 - protein, 274 aa, Ogataea parapolymorpha
MADIVPTFRLDNELTVVTGASGGLSNAIIKGLLAYGSELALLDMNLERTKETQAELFKFCVEELKIKEDLVPKMHSYVCDISDAEHVNEVFAQIYADFGKYPLHLVNTAGYCENFPAEQYPAKNAEKLLKVNLLGALYVAQAFAKPLIDNNIKGGSIVMIGSMSGEIVNDPQPQVAYNMSKAGVIHMVKSLAAEWAKYSIRVNTLSPGYILTPLTKNVINGNNEMYQRWLSLTPMGRLSEAKEFTGTVLYLLSNSASSYTTGANITVDGGFTCW

SEQ ID NO: 466 - protein, 364 aa, Scheffersomyces stipites
MTANPSLVLNKIDDISFESYDAPEITEPTDVLVEVKKTGICGSDIHYYAHGKIGNFVLTKPMVLGHESSGIVTKVGAGVTSLKVGDKVAIEPGIPSRLSDAYKSGHYNLCPHMCFAATPNSTEGEPNPPGTLCKYFKSPEDFLVKLPEHVSLEMGALVEPLSVGVHASKLASVRFGDYVAVFGAGPVGLLAAAVAKTFGAKGVIVIDIFDNKLQMAKDIGAATHTFNSKTGGDAAALVKAFDGHEPTVVLECTGAEPCINQGVAILAQGGRFVQVGNAPGPVKFPITEFATKELTLFGSFRYGFNDYKTSVDIMDTNYKNGKENAPIDFEQLITHRFKFDDAIKAYDLVRAGSGAVKCIIDGPE

SEQ ID NO: 467 - protein, 623 aa, Scheffersomyces stipites
MTTTPFDAPDKLFLGFDLSTQQLKIIVTDENLAALKTYNVEFDSINSSVQKGVIAINDEISKGAIISPVYMWLDALDHVFEDMKKDGFPFNKVVGISGSCQQHGSVYWSRTAEKVLSELDAESSLSSQMRSAFTFKHAPNWQDHSTGKELEEFERVIGADALADISGSRAHYRFTGLQIRKLSTRFKPEKYNRTARISLVSSFVASVLLGRITSIEEADACGMNLYDIEKREFNEELLAIAAGVHPELDGVEQDGEIYRAGINELKRKLGPVKPITYESEGDIASYFVTRYGFNPDCKIYSFTGDNLATIISLPLAPNDALISLGTSTTVLIITKNYAPSSQYHLFKHPTMPDHYMGMICYCNGSLAREKVRDEVNEKFNVEDKKSWDKFNEILDKSTDFNNKLGIYFPLGEIVPNAAAQIKRSVLNSKNEIVDVELGDKNWQPEDDVSSIVESQTLSCRLRTGPMLSKSGDSSASSSASPQPEGDGTDLHKVYQDLVKKFGDLYTDGKKQTFESLTARPNRCYYVGGASNNGSIIRKMGSILAPVNGNYKVDIPNACALGGAYKASWSYECEAKKEWIGYDQYINRLFEVSDEMNSFEVKDKWLEYANGVGMLAKMESELKH

SEQ ID NO: 468 - protein, 570 aa, Aspergillus niger
MQGPLYIGFDLSTQQLKGLVVNSDLKVVYVSKFDFDADSRGFPIKKGVLTNEAEHEVFAPVALWLQALDGVLEGLRKQGMDFSQIKGISGAGQQHGSVYWGENAEKLLKELDASKTLEEQLDGAFSHPFSPNWQDSSTQKECDEFDAALGGQSELAFATGSKAHHRFTGPQIMRFQRKYPDVYKKTSRISLVSSFIASLFLGHIAPMDISDVCGMNLWNIKKGAYDEKLLQLCAGSSGVDDLKRKLGDVPEDGGIHLGPIDRYYVERYGFSPDCTIIPATGDNPATILALPLRASDAMVSLGTSTTFLMSTPSYKPDPATHFFNHPTTAGLYMFMLCYKNGGLARELVRDAVNEKLGEKPSTSWANFDKVTLETPPMGQKADSDPMKLGLFFPRPEIVPNLRSGQWRFDYNPKDGSLQPSNGGWDEPFDEARAIVESQMLSLRLRSRGLTQSPGEGIPAQPRRVYLVGGGSKNKAIAKVAGEILGGSEGVYKLEIGDNACALGAAYKAVWAMERAEGQTFEDLIGKRWHEEEFIEKIADGYQPGVFERYGQAVEGFEKMELEVLRQEGKH

SEQ ID NO: 469 - DNA, 90 bp, Artificial Sequence
  Artificial DNA Primer
tgtacaccccccccctccacaaacacaaatattgataatataaagatttattggagaaagataacatatcatactttcccccactttttt

SEQ ID NO: 470 - DNA, 90 bp, Artificial Sequence
  Artificial DNA Primer
aaaaaagtgggggaaagtatgatatgttatctttctccaataaatctttatattatcaatatttgtgtttgtggagggggggggtgtaca

SEQ ID NO: 471 - DNA, 25 bp, Artificial Sequence
  Artificial DNA Primer
aacgacagcacaaaggaactttcac

SEQ ID NO: 472 - DNA, 48 bp, Artificial Sequence
  Artificial DNA Primer
tttttattattagtctttttttttttttgacaatatctgtatgatttg

SEQ ID NO: 473 - DNA, 82 bp, Artificial Sequence
  Artificial DNA Primer
atcaaatcatacagatattgtcaaaaaaaaaaaaagactaataataaaaaatgaccaagcagtataagaactatgtaaacgg

SEQ ID NO: 474 - DNA, 31 bp, Artificial Sequence
  Artificial DNA Primer
ggctactgattttgttaagcaactcatcaag

SEQ ID NO: 475 - DNA, 20 bp, Artificial Sequence
  Artificial DNA Primer
agattgcccggccctttttg

SEQ ID NO: 476 - DNA, 22 bp, Artificial Sequence
  Artificial DNA Primer
aggtgaccaggctgagttcatg

SEQ ID NO: 477 - DNA, 90 bp, Artificial Sequence
  Artificial DNA Primer
taccaagtacgctcgagggtacattctaatgcattaaaagacatgtgagaaagcaggcaagaaaaagaaacaaataatatagactgatag

SEQ ID NO: 478 - DNA, 90 bp, Artificial Sequence
  Artificial DNA Primer
ctatcagtctatattatttgtttctttttcttgcctgctttctcacatgtcttttaatgcattagaatgtaccctcgagcgtacttggta

SEQ ID NO: 479 - DNA, 27 bp, Artificial Sequence
  Artificial DNA Primer
cattccattcacatatcgtctttggcc

SEQ ID NO: 480 - DNA, 29 bp, Artificial Sequence
  Artificial DNA Primer
cacatctgaaatcatcgtaaggaactttg

SEQ ID NO: 481 - DNA, 22 bp, Artificial Sequence
  Artificial DNA Primer
gagatggcctattgatatcaag

SEQ ID NO: 482 - DNA, 36 bp, Artificial Sequence
  Artificial DNA Primer
gcattcacctaaatagctactgctctattaatacag

SEQ ID NO: 483 - DNA, 28 bp, Artificial Sequence
  Artificial DNA Primer
actcagctttgctaaagtgcaaaaagtc

SEQ ID NO: 484 - DNA, 35 bp, Artificial Sequence
  Artificial DNA Primer
agtgcttttaactaagaattattagtcttttctgc

SEQ ID NO: 485 - DNA, 21 bp, Artificial Sequence
  Artificial DNA Primer
acagaagacgggagacactag

SEQ ID NO: 486 - DNA, 31 bp, Artificial Sequence
  Artificial DNA Primer
gccattagtagtgtactcaaacgaattattg

SEQ ID NO: 487 - DNA, 19 bp, Artificial Sequence
  Artificial DNA Primer
tcttttcgcgccctggaaa

SEQ ID NO: 488 - DNA, 44 bp, Artificial Sequence
  Artificial DNA Primer
tgttttatatttgttgtaaaaagtagataattacttccttgatg

SEQ ID NO: 489 - DNA, 44 bp, Artificial Sequence
  Artificial DNA Primer
tttgttttttgttttcttctaattgattttttctttctatttcc

SEQ ID NO: 490 - DNA, 48 bp, Artificial Sequence
  Artificial DNA Primer
attgatattgttcgataattaaatctttcttatcttcttattcttttc

SEQ ID NO: 491 - DNA, 30 bp, Artificial Sequence
  Artificial DNA Primer
attttcaacatcgtattttccgaagcgttg

SEQ ID NO: 492 - DNA, 22 bp, Artificial Sequence
  Artificial DNA Primer
ttgacgtggctgaacaacagtc

SEQ ID NO: 493 - DNA, 32 bp, Artificial Sequence
  Artificial DNA Primer
tcagtccaatgacagtattttctccttctcac

SEQ ID NO: 494 - DNA, 38 bp, Artificial Sequence
  Artificial DNA Primer
acagatcatcaaggaagtaattatctactttttacaac

SEQ ID NO: 495 - DNA, 33 bp, Artificial Sequence
  Artificial DNA Primer
aaagaggaaacttcaacgcttcatttgaaaatc

SEQ ID NO: 496 - DNA, 41 bp, Artificial Sequence
  Artificial DNA Primer
aattgtagaatacaaatacataaataagtgtgttcccgaag

SEQ ID NO: 497 - DNA, 84 bp, Artificial Sequence
  Artificial DNA Primer
accaaaggaaatagaaagaaaaaatcaattagaagaaaacaaaaaacaaaatgtatagaatttcaaacatctatgttctagcag

SEQ ID NO: 498 - DNA, 74 bp, Artificial Sequence
  Artificial DNA Primer
atgatgaaaaaataagcagaaaagactaataattcttagttaaaagcactttatactacctcagcgtgtactgc
